United States Patent Application Publication US 2025/0129348 A1 - sequence listing, part 2

SEQ ID NO: 692 - DNA, 9109 bp, synthetic construct
  source 1..9109: mol_type = other DNA
agatatacgcgttgacattgattattgactagttattaatagtaatcaattacggggtcattagttcatagcccatatatggagttccgcgttacataacttacggtaaatggcccgcctggctgaccgcccaacgacccccgcccattgacgtcaataatgacgtatgttcccatagtaacgccaatagggactttccattgacgtcaatgggtggagtatttacggtaaactgcccacttggcagtacatcaagtgtatcatatgccaagtacgccccctattgacgtcaatgacggtaaatggcccgcctggcattatgcccagtacatgaccttatgggactttcctacttggcagtacatctacgtattagtcatcgctattaccatggtgatgcggttttggcagtacatcaatgggcgtggatagcggtttgactcacggggatttccaagtctccaccccattgacgtcaatgggagtttgttttggcaccaaaatcaacgggactttccaaaatgtcgtaacaactccgccccattgacgcaaatgggcggtaggcgtgtacggtgggaggtctatataagcagagctggtttagtgaaccgtcagatccgctagagatccgcggccgctaatacgactcactatagggagagccgccaccatgaaacggacagccgacggaagcgagttcgagtcaccaaagaagaagcggaaagtcgaggcctcccccgcatcaggacctagacacctgatggatccccatattttcacatctaacttcaacaacggaatcggcagacacaagacctacctgtgctatgaggtggaaaggctggataacggaacctctgtgaagatggaccagcacaggtaagtatcaaggttacaagacaggtttaaggagaccaatagaaactgggcttgtcgagacagagaagactcttgcgtttctgataggcacctattggtcttactgacatccactttgcctttctctccacaggggcttcctgcataaccaggccaagaatctgctgtgcggtttctacgggagacatgcagaactgaggtttctggatctggtgccatccctgcagctggaccccgctcagatctacagagtgacttggttcatctcttggagcccttgcttttcatggggatgtgctggcgaggtgagggccttccttcaggaaaacacacacgtgagactgaggatttttgctgccagaatctacgattatgacccactgtacaaggaagctctgcagatgctgagggatgcaggcgctcaggtgagcattatgacctatgacgaattcaagcactgctgggatacttttgtggaccatcagggttgtccttttcagccatgggatgggctggacgagcattctcaggcactgagcggtagactgagggctatcctgcagaaccaggggaattctggtggttcttctggtggttcttctggtggttctaaagacaagttcaagctgtacttccagaacccgcaatttatggggggctgggacaaggataaagagacagactaccgcgcgacaattctccgctatggctccaaatactatctggccatcatggacaagaagtacgcgaagtgcctgcagaagatcgacaaagacgacgtcaatggcaactatgaaaagatcaactacaagctgctgccgggcccgaacaagatgctcccgaaggtgttcttcagcaagaagtggatggcctactacaatccaagcgaggatattcagaaaatctataaaaacgggaccttcaagaagggggacatgtttaacctcaacgactgccacaagctcattgatttcttcaaggatagcatttcccgctacccgaaatggtccaatgcgtacgattttaacttctccgagacagaaaagtacaaagacatcgcgggcttttacagggaggtggaggagcaagggtataaagtttcttttgaatccgcgagcaagaaggaagtcgacaagctcgtcgaggagggcaagctctacatgttccaaatttataacaaggacttttccgacaagagccatgggaccccaaacctccacaccatgtacttcaaactgctctttgacgagaacaaccacgggcaaatcaggctgagcggcggcgccgaattattcatgcgcagggcctccctcaagaaggaagagctggtcgtccatccagccaattccccgatcgcgaacaagaacccggacaatccgaaaaagaccaccaccctgtcctacgacgtctacaaggacaaacgcttcagcgaagaccagtacgaattacacatcccaattgcgattaataagtgcccaaagaatatcttcaaaattaatacagaggtcagggtgctgctcaaacacgacgacaatccgtatgtcatcggcattgccaggggcgagcgcaatctgctctatatcgtggtcgtggatgggaagggcaatattgtggagcagtactccctgaacgagattatcaacaacttcaatgggattaggattaagaccgactatcacagcctgctcgacaagaaagaaaaagagaggtttgaggcccgccaaaactggacctccattgagaatatcaaagaattaaaggccggctatatttcccaagtcgtccacaagatctgcgagctggtggagaaatatgacgccgtgattgcgctcgaagacttaaattctgggttcaagaactcccgcgtgaaggtggaaaaacaggtgtatcagaaattcgagaaaatgctgatcgacaaactcaattatatggtggataagaagtccaacccgtgtgccacagggggcgcgctgaagggctatcagatcaccaacaagttcgagagcttcaagagcatgagcacccagaacgggtttattttctacatcccggcgtggctcacctccaagattgacccgagcaccggcttcgtgaacctcctgaagacaaagtatacctccattgccgacagcaagaagtttatctcctccttcgaccgcattatgtatgtgccggaggaggacctcttcgagttcgccctcgactacaaaaacttcagccgcacagatgcggattacatcaagaagtggaagctgtactcctacgggaacaggatccgcatcttcaggaatccaaaaaaaaataacgtctttgactgggaggaagtgtgcctgacatccgcctacaaggaactgttcaataaatacggcatcaattaccagcagggcgacattcgcgccctcctctgtgagcagtccgacaaagcgttttactccagcttcatggccctcatgtccctgatgctccaaatgaggaatagcatcacagggcgcaccgacgtcgacttcctcatcagcccggtgaagaactccgacgggatcttttacgactcccgcaactatgaggcgcaagagaatgcgatcctcccgaagaacgccgatgcgaacggggcctataatatcgccaggaaagtgctctgggccatcgggcagttcaaaaaggcggaggatgagaagctcgacaaggtgaaaattgccatttccaacaaggagtggctggagtacgcgcagacctccgtgaagcacggctcctctggcagctccggctctagcggctcctctggcagctccggctccaagctggagaagtttacaaactgttacagcctctccaaaaccctcaggtttaaagcgatcccggtgggcaagacccaggagaacatcgacaacaagaggctcctggtggaagacgagaagcgcgccgaagactacaagggcgtgaagaagctgctcgataggtactacctcagctttattaacgacgtgctgcacagcatcaaactcaagaatctcaacaactacatctccctcttccgcaaaaagacccgcaccgagaaggagaacaaggagctggagaacctggagatcaacctccgcaaggaaatcgccaaagcgttcaagggcaatgaagggtacaagagcctcttcaagaaagacatcatcgaaactatcctcccagagtttctcgatgacaaggacgagatcgcgctggtgaactcctttaacgggttcacaaccgcgtttaccggcttctttgataacagggaaaatatgttctccgaggaggccaagtccaccagcatcgccttcaggtgtatcaacgagaacctcacccgctacatttccaatatggacattttcgagaaggtggatgcgatcttcgataagcacgaggtgcaggagatcaaagagaagattctcaattccgattatgacgtcgaggatttcttcgaaggggagttctttaattttgtgctcacacaagagggcattgacgtgtacaacgcgattatcgggggcttcgtcacagagtccggggagaagattaaggggctgaatgagtacatcaatctgtacaatcagaagaccaagcagaaactgccgaaattcaagccgctctacaagcaagtcctgtccgatagggaaagcctctccttctacggcgagggctataccagcgacgaggaggtgctggaagtcttccgcaacacactgaataagaatagcgagattttctcctccatcaagaagctcgagaagctctttaagaactttgacgagtacagctccgccgggattttcgtgaagaacgggccggcgatcagcaccatctccaaggacatctttggcgagtggaacgtcatcagggacaagtggaacgccgagtacgacgacatccacctgaagaagaaggcggtggtgaccgagaagtatgaggacgatcgcaggaagtccttcaaaaaaatcggctccttcagcctcgaacagctccaggagtatgccgatgcggatctgtccgtcgtcgagaagctgaaggaaatcatcattcagaaggtcgacgagatctataaagtgtacgggtccagcgagaagctgttcgacgccgactttgtgctcgagaagtccctcaaaaagaatgacgccgtggtggccattatgaaagacctgctcgactccgtgaagtccttcgaaaattacattaaagcgttctttggggaggggaaggaaactaacagggatgagtccttctatggcgactttgtcctcgcgtacgacatcctgctgaaggtcgaccacatttacgacgcgatccgcaactacgtgacacagaagccgtactcctcaggcggaagtggtggaagtggcggtagtaccaacctcagcgacattatcgagaaggaaaccggcaagcaactcgtgatccaggagagcatactgatgctccccgaggaggtcgaggaggtgattggcaataagcccgagtccgatatactggttcatactgcgtatgacgaaagcacagacgagaacgtcatgctacttaccagcgacgccccggagtacaagccctgggccctagtcatccaagacagcaacggtgagaacaagatcaagatgctttctggcggctcaaaaagaaccgccgacggcagcgaattcgagcccaagaagaagaggaaagtcggaagcggagctactaacttcagcctgctgaagcaggctggagacgtggaggagaaccctggacctatggtgagcaagggcgaggagctgttcaccggggtggtgcccatcctggtcgagctggacggcgacgtaaacggccacaagttcagcgtgtccggcgagggcgagggcgatgccacctacggcaagctgaccctgaagttcatctgcaccaccggcaagctgcccgtgccctggcccaccctcgtgaccaccctgacctatggagtgcagtgcttcagccgctaccccgaccacatgaagcagcacgacttcttcaagtccgccatgcccgaaggctacgtccaggagcgcaccatcttcttcaaggacgacggcaactacaagacccgcgccgaggtgaagttcgagggcgacaccctggtgaaccgcatcgagctgaagggcatcgacttcaaggaggacggcaacatcctggggcacaagctggagtacaactacaacagccacaacgtctatatcatggccgacaagcagaagaacggcatcaaggtgaacttcaagatccgccacaacatcgaggacggcagcgtgcagctcgccgaccactaccagcagaacacccccatcggcgacggccccgtgctgctgcccgacaaccactacctgagcacccagtccgccctgagcaaagaccccaacgagaagcgcgatcacatggtcctgctggagttcgtgaccgccgccgggatcactctcggcatggacgagctgtacaagtctggtggttctcccaagaagaagaggaaagtctaaccggtcatcatcaccatcaccattgagtttaaacccgctgatcagcctcgactgtgccttctagttgccagccatctgttgtttgcccctcccccgtgccttccttgaccctggaaggtgccactcccactgtcctttcctaataaaatgaggaaattgcatcgcattgtctgagtaggtgtcattctattctggggggtggggtggggcaggacagcaagggggaggattgggaagacaatagcaggcatgctggggatgcggtgggctctatggcttctgaggcgaaaagaaccagctggggctcgataccgtcgacctctagctagagcttggcgtaatcatggtcatagctgtttcctgtgtgaaattgttatccgctcacaattccacacaacatacgagccggaagcataaagtgtaaagcctagggtgcctaatgagtgagctaactcacattaattgcgttgcgctcactgcccgctttccagtcgggaaacctgtcgtgccagctgcattaatgaatcggccaacgcgcgggaagaggcggtttgcgtattgggcgctcttccgcttcctcgctcactgactcgctgcgctcggtcgttcggctgcggcgagcggtatcagctcactcaaaggcggtaatacggttatccacagaatcaggggataacgcaggaaagaacatgtgagcaaaaggccagcaaaaggccaggaaccgtaaaaaggccgcgttgctggcgtttttccataggctccgcccccctgacgagcatcacaaaaatcgacgctcaagtcagaggtggcgaaacccgacaggactataaagataccaggcgtttccccctggaagctccctcgtgcgctctcctgttccgaccctgccgcttaccggatacctgtccgcctttctcccttcgggaagcgtggcgctttctcatagctcacgctgtaggtatctcagttcggtgtaggtcgttcgctccaagctgggctgtgtgcacgaaccccccgttcagcccgaccgctgcgccttatccggtaactatcgtcttgagtccaacccggtaagacacgacttatcgccactggcagcagccactggtaacaggattagcagagcgaggtatgtaggcggtgctacagagttcttgaagtggtggcctaactacggctacactagaagaacagtatttggtatctgcgctctgctgaagccagttaccttcggaaaaagagttggtagctcttgatccggcaaacaaaccaccgctggtagcggtggtttttttgtttgcaagcagcagattacgcgcagaaaaaaaggatctcaagaagatcctttgatcttttctacggggtctgacactcagtggaacgaaaactcacgttaagggattttggtcatgagattatcaaaaaggatcttcacctagatccttttaaattaaaaatgaagttttaaatcaatctaaagtatatatgagtaaacttggtctgacagttaccaatgcttaatcagtgaggcacctatctcagcgatctgtctatttcgttcatccatagttgcctgactccccgtcgtgtagataactacgatacgggagggcttaccatctggccccagtgctgcaatgataccgcgagacccacgctcaccggctccagatttatcagcaataaaccagccagccggaagggccgagcgcagaagtggtcctgcaactttatccgcctccatccagtctattaattgttgccgggaagctagagtaagtagttcgccagttaatagtttgcgcaacgttgttgccattgctacaggcatcgtggtgtcacgctcgtcgtttggtatggcttcattcagctccggttcccaacgatcaaggcgagttacatgatcccccatgttgtgcaaaaaagcggttagctccttcggtcctccgatcgttgtcagaagtaagttggccgcagtgttatcactcatggttatggcagcactgcataattctcttactgtcatgccatccgtaagatgcttttctgtgactggtgagtactcaaccaagtcattctgagaatagtgtatgcggcgaccgagttgctcttgcccggcgtcaatacgggataataccgcgccacatagcagaactttaaaagtgctcatcattggaaaacgttcttcggggcgaaaactctcaaggatcttaccgctgttgagatccagttcgatgtaacccactcgtgcacccaactgatcttcagcatcttttactttcaccagcgtttctgggtgagcaaaaacaggaaggcaaaatgccgcaaaaaagggaataagggcgacacggaaatgttgaatactcatactcttcctttttcaatattattgaagcatttatcagggttattgtctcatgagcggatacatatttgaatgtatttagaaaaataaacaaataggggttccgcgcacatttccccgaaaagtgccacctgacgtcgacggatcgggagatcgatctcccgatcccctagggtcgactctcagtacaatctgctctgatgccgcatagttaagccagtatctgctccctgcttgtgtgttggaggtcgctgagtagtgcgcgagcaaaatttaagctacaacaaggcaaggcttgaccgacaattgcatgaagaatctgcttagggttaggcgttttgcgctgcttcgcgatgtacgggcc

SEQ ID NO: 693 - DNA, 9097 bp, synthetic construct
  source 1..9097: mol_type = other DNA
agatatacgcgttgacattgattattgactagttattaatagtaatcaattacggggtcattagttcatagcccatatatggagttccgcgttacataacttacggtaaatggcccgcctggctgaccgcccaacgacccccgcccattgacgtcaataatgacgtatgttcccatagtaacgccaatagggactttccattgacgtcaatgggtggagtatttacggtaaactgcccacttggcagtacatcaagtgtatcatatgccaagtacgccccctattgacgtcaatgacggtaaatggcccgcctggcattatgcccagtacatgaccttatgggactttcctacttggcagtacatctacgtattagtcatcgctattaccatggtgatgcggttttggcagtacatcaatgggcgtggatagcggtttgactcacggggatttccaagtctccaccccattgacgtcaatgggagtttgttttggcaccaaaatcaacgggactttccaaaatgtcgtaacaactccgccccattgacgcaaatgggcggtaggcgtgtacggtgggaggtctatataagcagagctggtttagtgaaccgtcagatccgctagagatccgcggccgctaatacgactcactatagggagagccgccaccatgaaacggacagccgacggaagcgagttcgagtcaccaaagaagaagcggaaagtcgaggcctcccccgcatcaggacctagacacctgatggatccccatattttcacatctaacttcaacaacggaatcggcagacacaagacctacctgtgctatgaggtggaaaggctggataacggaacctctgtgaagatggaccagcacaggtaagtatcaaggttacaagacaggtttaaggagaccaatagaaactgggcttgtcgagacagagaagactcttgcgtttctgataggcacctattggtcttactgacatccactttgcctttctctccacaggggcttcctgcataaccaggccaagaatctgctgtgcggtttctacgggagacatgcagaactgaggtttctggatctggtgccatccctgcagctggaccccgctcagatctacagagtgacttggttcatctcttggagcccttgcttttcatggggatgtgctggcgaggtgagggccttccttcaggaaaacacacacgtgagactgaggatttttgctgccagaatctacgattatgacccactgtacaaggaagctctgcagatgctgagggatgcaggcgctcaggtgagcattatgacctatgacgaattcaagcactgctgggatacttttgtggaccatcagggttgtccttttcagccatgggatgggctggacgagcattctcaggcactgagcggtagactgagggctatcctgcagaaccaggggaattctggtggttcttctggtggttctaaagacaagttcaagctgtacttccagaacccgcaatttatggggggctgggacaaggataaagagacagactaccgcgcgacaattctccgctatggctccaaatactatctggccatcatggacaagaagtacgcgaagtgcctgcagaagatcgacaaagacgacgtcaatggcaactatgaaaagatcaactacaagctgctgccgggcccgaacaagatgctcccgaaggtgttcttcagcaagaagtggatggcctactacaatccaagcgaggatattcagaaaatctataaaaacgggaccttcaagaagggggacatgtttaacctcaacgactgccacaagctcattgatttcttcaaggatagcatttcccgctacccgaaatggtccaatgcgtacgattttaacttctccgagacagaaaagtacaaagacatcgcgggcttttacagggaggtggaggagcaagggtataaagtttcttttgaatccgcgagcaagaaggaagtcgacaagctcgtcgaggagggcaagctctacatgttccaaatttataacaaggacttttccgacaagagccatgggaccccaaacctccacaccatgtacttcaaactgctctttgacgagaacaaccacgggcaaatcaggctgagcggcggcgccgaattattcatgcgcagggcctccctcaagaaggaagagctggtcgtccatccagccaattccccgatcgcgaacaagaacccggacaatccgaaaaagaccaccaccctgtcctacgacgtctacaaggacaaacgcttcagcgaagaccagtacgaattacacatcccaattgcgattaataagtgcccaaagaatatcttcaaaattaatacagaggtcagggtgctgctcaaacacgacgacaatccgtatgtcatcggcattgccaggggcgagcgcaatctgctctatatcgtggtcgtggatgggaagggcaatattgtggagcagtactccctgaacgagattatcaacaacttcaatgggattaggattaagaccgactatcacagcctgctcgacaagaaagaaaaagagaggtttgaggcccgccaaaactggacctccattgagaatatcaaagaattaaaggccggctatatttcccaagtcgtccacaagatctgcgagctggtggagaaatatgacgccgtgattgcgctcgaagacttaaattctgggttcaagaactcccgcgtgaaggtggaaaaacaggtgtatcagaaattcgagaaaatgctgatcgacaaactcaattatatggtggataagaagtccaacccgtgtgccacagggggcgcgctgaagggctatcagatcaccaacaagttcgagagcttcaagagcatgagcacccagaacgggtttattttctacatcccggcgtggctcacctccaagattgacccgagcaccggcttcgtgaacctcctgaagacaaagtatacctccattgccgacagcaagaagtttatctcctccttcgaccgcattatgtatgtgccggaggaggacctcttcgagttcgccctcgactacaaaaacttcagccgcacagatgcggattacatcaagaagtggaagctgtactcctacgggaacaggatccgcatcttcaggaatccaaaaaaaaataacgtctttgactgggaggaagtgtgcctgacatccgcctacaaggaactgttcaataaatacggcatcaattaccagcagggcgacattcgcgccctcctctgtgagcagtccgacaaagcgttttactccagcttcatggccctcatgtccctgatgctccaaatgaggaatagcatcacagggcgcaccgacgtcgacttcctcatcagcccggtgaagaactccgacgggatcttttacgactcccgcaactatgaggcgcaagagaatgcgatcctcccgaagaacgccgatgcgaacggggcctataatatcgccaggaaagtgctctgggccatcgggcagttcaaaaaggcggaggatgagaagctcgacaaggtgaaaattgccatttccaacaaggagtggctggagtacgcgcagacctccgtgaagcacggctcctctggcagctccggctctagcggctcctctggcagctccggctccaagctggagaagtttacaaactgttacagcctctccaaaaccctcaggtttaaagcgatcccggtgggcaagacccaggagaacatcgacaacaagaggctcctggtggaagacgagaagcgcgccgaagactacaagggcgtgaagaagctgctcgataggtactacctcagctttattaacgacgtgctgcacagcatcaaactcaagaatctcaacaactacatctccctcttccgcaaaaagacccgcaccgagaaggagaacaaggagctggagaacctggagatcaacctccgcaaggaaatcgccaaagcgttcaagggcaatgaagggtacaagagcctcttcaagaaagacatcatcgaaactatcctcccagagtttctcgatgacaaggacgagatcgcgctggtgaactcctttaacgggttcacaaccgcgtttaccggcttctttgataacagggaaaatatgttctccgaggaggccaagtccaccagcatcgccttcaggtgtatcaacgagaacctcacccgctacatttccaatatggacattttcgagaaggtggatgcgatcttcgataagcacgaggtgcaggagatcaaagagaagattctcaattccgattatgacgtcgaggatttcttcgaaggggagttctttaattttgtgctcacacaagagggcattgacgtgtacaacgcgattatcgggggcttcgtcacagagtccggggagaagattaaggggctgaatgagtacatcaatctgtacaatcagaagaccaagcagaaactgccgaaattcaagccgctctacaagcaagtcctgtccgatagggaaagcctctccttctacggcgagggctataccagcgacgaggaggtgctggaagtcttccgcaacacactgaataagaatagcgagattttctcctccatcaagaagctcgagaagctctttaagaactttgacgagtacagctccgccgggattttcgtgaagaacgggccggcgatcagcaccatctccaaggacatctttggcgagtggaacgtcatcagggacaagtggaacgccgagtacgacgacatccacctgaagaagaaggcggtggtgaccgagaagtatgaggacgatcgcaggaagtccttcaaaaaaatcggctccttcagcctcgaacagctccaggagtatgccgatgcggatctgtccgtcgtcgagaagctgaaggaaatcatcattcagaaggtcgacgagatctataaagtgtacgggtccagcgagaagctgttcgacgccgactttgtgctcgagaagtccctcaaaaagaatgacgccgtggtggccattatgaaagacctgctcgactccgtgaagtccttcgaaaattacattaaagcgttctttggggaggggaaggaaactaacagggatgagtccttctatggcgactttgtcctcgcgtacgacatcctgctgaaggtcgaccacatttacgacgcgatccgcaactacgtgacacagaagccgtactcctcaggcggaagtggtggaagtggcggtagtaccaacctcagcgacattatcgagaaggaaaccggcaagcaactcgtgatccaggagagcatactgatgctccccgaggaggtcgaggaggtgattggcaataagcccgagtccgatatactggttcatactgcgtatgacgaaagcacagacgagaacgtcatgctacttaccagcgacgccccggagtacaagccctgggccctagtcatccaagacagcaacggtgagaacaagatcaagatgctttctggcggctcaaaaagaaccgccgacggcagcgaattcgagcccaagaagaagaggaaagtcggaagcggagctactaacttcagcctgctgaagcaggctggagacgtggaggagaaccctggacctatggtgagcaagggcgaggagctgttcaccggggtggtgcccatcctggtcgagctggacggcgacgtaaacggccacaagttcagcgtgtccggcgagggcgagggcgatgccacctacggcaagctgaccctgaagttcatctgcaccaccggcaagctgcccgtgccctggcccaccctcgtgaccaccctgacctatggagtgcagtgcttcagccgctaccccgaccacatgaagcagcacgacttcttcaagtccgccatgcccgaaggctacgtccaggagcgcaccatcttcttcaaggacgacggcaactacaagacccgcgccgaggtgaagttcgagggcgacaccctggtgaaccgcatcgagctgaagggcatcgacttcaaggaggacggcaacatcctggggcacaagctggagtacaactacaacagccacaacgtctatatcatggccgacaagcagaagaacggcatcaaggtgaacttcaagatccgccacaacatcgaggacggcagcgtgcagctcgccgaccactaccagcagaacacccccatcggcgacggccccgtgctgctgcccgacaaccactacctgagcacccagtccgccctgagcaaagaccccaacgagaagcgcgatcacatggtcctgctggagttcgtgaccgccgccgggatcactctcggcatggacgagctgtacaagtctggtggttctcccaagaagaagaggaaagtctaaccggtcatcatcaccatcaccattgagtttaaacccgctgatcagcctcgactgtgccttctagttgccagccatctgttgtttgcccctcccccgtgccttccttgaccctggaaggtgccactcccactgtcctttcctaataaaatgaggaaattgcatcgcattgtctgagtaggtgtcattctattctggggggtggggtggggcaggacagcaagggggaggattgggaagacaatagcaggcatgctggggatgcggtgggctctatggcttctgaggcgaaaagaaccagctggggctcgataccgtcgacctctagctagagcttggcgtaatcatggtcatagctgtttcctgtgtgaaattgttatccgctcacaattccacacaacatacgagccggaagcataaagtgtaaagcctagggtgcctaatgagtgagctaactcacattaattgcgttgcgctcactgcccgctttccagtcgggaaacctgtcgtgccagctgcattaatgaatcggccaacgcgcgggaagaggcggtttgcgtattgggcgctcttccgcttcctcgctcactgactcgctgcgctcggtcgttcggctgcggcgagcggtatcagctcactcaaaggcggtaatacggttatccacagaatcaggggataacgcaggaaagaacatgtgagcaaaaggccagcaaaaggccaggaaccgtaaaaaggccgcgttgctggcgtttttccataggctccgcccccctgacgagcatcacaaaaatcgacgctcaagtcagaggtggcgaaacccgacaggactataaagataccaggcgtttccccctggaagctccctcgtgcgctctcctgttccgaccctgccgcttaccggatacctgtccgcctttctcccttcgggaagcgtggcgctttctcatagctcacgctgtaggtatctcagttcggtgtaggtcgttcgctccaagctgggctgtgtgcacgaaccccccgttcagcccgaccgctgcgccttatccggtaactatcgtcttgagtccaacccggtaagacacgacttatcgccactggcagcagccactggtaacaggattagcagagcgaggtatgtaggcggtgctacagagttcttgaagtggtggcctaactacggctacactagaagaacagtatttggtatctgcgctctgctgaagccagttaccttcggaaaaagagttggtagctcttgatccggcaaacaaaccaccgctggtagcggtggtttttttgtttgcaagcagcagattacgcgcagaaaaaaaggatctcaagaagatcctttgatcttttctacggggtctgacactcagtggaacgaaaactcacgttaagggattttggtcatgagattatcaaaaaggatcttcacctagatccttttaaattaaaaatgaagttttaaatcaatctaaagtatatatgagtaaacttggtctgacagttaccaatgcttaatcagtgaggcacctatctcagcgatctgtctatttcgttcatccatagttgcctgactccccgtcgtgtagataactacgatacgggagggcttaccatctggccccagtgctgcaatgataccgcgagacccacgctcaccggctccagatttatcagcaataaaccagccagccggaagggccgagcgcagaagtggtcctgcaactttatccgcctccatccagtctattaattgttgccgggaagctagagtaagtagttcgccagttaatagtttgcgcaacgttgttgccattgctacaggcatcgtggtgtcacgctcgtcgtttggtatggcttcattcagctccggttcccaacgatcaaggcgagttacatgatcccccatgttgtgcaaaaaagcggttagctccttcggtcctccgatcgttgtcagaagtaagttggccgcagtgttatcactcatggttatggcagcactgcataattctcttactgtcatgccatccgtaagatgcttttctgtgactggtgagtactcaaccaagtcattctgagaatagtgtatgcggcgaccgagttgctcttgcccggcgtcaatacgggataataccgcgccacatagcagaactttaaaagtgctcatcattggaaaacgttcttcggggcgaaaactctcaaggatcttaccgctgttgagatccagttcgatgtaacccactcgtgcacccaactgatcttcagcatcttttactttcaccagcgtttctgggtgagcaaaaacaggaaggcaaaatgccgcaaaaaagggaataagggcgacacggaaatgttgaatactcatactcttcctttttcaatattattgaagcatttatcagggttattgtctcatgagcggatacatatttgaatgtatttagaaaaataaacaaataggggttccgcgcacatttccccgaaaagtgccacctgacgtcgacggatcgggagatcgatctcccgatcccctagggtcgactctcagtacaatctgctctgatgccgcatagttaagccagtatctgctccctgcttgtgtgttggaggtcgctgagtagtgcgcgagcaaaatttaagctacaacaaggcaaggcttgaccgacaattgcatgaagaatctgcttagggttaggcgttttgcgctgcttcgcgatgtacgggcc

SEQ ID NO: 694 - DNA, 9091 bp, synthetic construct
  source 1..9091: mol_type = other DNA
agatatacgcgttgacattgattattgactagttattaatagtaatcaattacggggtcattagttcatagcccatatatggagttccgcgttacataacttacggtaaatggcccgcctggctgaccgcccaacgacccccgcccattgacgtcaataatgacgtatgttcccatagtaacgccaatagggactttccattgacgtcaatgggtggagtatttacggtaaactgcccacttggcagtacatcaagtgtatcatatgccaagtacgccccctattgacgtcaatgacggtaaatggcccgcctggcattatgcccagtacatgaccttatgggactttcctacttggcagtacatctacgtattagtcatcgctattaccatggtgatgcggttttggcagtacatcaatgggcgtggatagcggtttgactcacggggatttccaagtctccaccccattgacgtcaatgggagtttgttttggcaccaaaatcaacgggactttccaaaatgtcgtaacaactccgccccattgacgcaaatgggcggtaggcgtgtacggtgggaggtctatataagcagagctggtttagtgaaccgtcagatccgctagagatccgcggccgctaatacgactcactatagggagagccgccaccatgaaacggacagccgacggaagcgagttcgagtcaccaaagaagaagcggaaagtcgaggcctcccccgcatcaggacctagacacctgatggatccccatattttcacatctaacttcaacaacggaatcggcagacacaagacctacctgtgctatgaggtggaaaggctggataacggaacctctgtgaagatggaccagcacaggtaagtatcaaggttacaagacaggtttaaggagaccaatagaaactgggcttgtcgagacagagaagactcttgcgtttctgataggcacctattggtcttactgacatccactttgcctttctctccacaggggcttcctgcataaccaggccaagaatctgctgtgcggtttctacgggagacatgcagaactgaggtttctggatctggtgccatccctgcagctggaccccgctcagatctacagagtgacttggttcatctcttggagcccttgcttttcatggggatgtgctggcgaggtgagggccttccttcaggaaaacacacacgtgagactgaggatttttgctgccagaatctacgattatgacccactgtacaaggaagctctgcagatgctgagggatgcaggcgctcaggtgagcattatgacctatgacgaattcaagcactgctgggatacttttgtggaccatcagggttgtccttttcagccatgggatgggctggacgagcattctcaggcactgagcggtagactgagggctatcctgcagaaccaggggaattctggttcttctggttctaaagacaagttcaagctgtacttccagaacccgcaatttatggggggctgggacaaggataaagagacagactaccgcgcgacaattctccgctatggctccaaatactatctggccatcatggacaagaagtacgcgaagtgcctgcagaagatcgacaaagacgacgtcaatggcaactatgaaaagatcaactacaagctgctgccgggcccgaacaagatgctcccgaaggtgttcttcagcaagaagtggatggcctactacaatccaagcgaggatattcagaaaatctataaaaacgggaccttcaagaagggggacatgtttaacctcaacgactgccacaagctcattgatttcttcaaggatagcatttcccgctacccgaaatggtccaatgcgtacgattttaacttctccgagacagaaaagtacaaagacatcgcgggcttttacagggaggtggaggagcaagggtataaagtttcttttgaatccgcgagcaagaaggaagtcgacaagctcgtcgaggagggcaagctctacatgttccaaatttataacaaggacttttccgacaagagccatgggaccccaaacctccacaccatgtacttcaaactgctctttgacgagaacaaccacgggcaaatcaggctgagcggcggcgccgaattattcatgcgcagggcctccctcaagaaggaagagctggtcgtccatccagccaattccccgatcgcgaacaagaacccggacaatccgaaaaagaccaccaccctgtcctacgacgtctacaaggacaaacgcttcagcgaagaccagtacgaattacacatcccaattgcgattaataagtgcccaaagaatatcttcaaaattaatacagaggtcagggtgctgctcaaacacgacgacaatccgtatgtcatcggcattgccaggggcgagcgcaatctgctctatatcgtggtcgtggatgggaagggcaatattgtggagcagtactccctgaacgagattatcaacaacttcaatgggattaggattaagaccgactatcacagcctgctcgacaagaaagaaaaagagaggtttgaggcccgccaaaactggacctccattgagaatatcaaagaattaaaggccggctatatttcccaagtcgtccacaagatctgcgagctggtggagaaatatgacgccgtgattgcgctcgaagacttaaattctgggttcaagaactcccgcgtgaaggtggaaaaacaggtgtatcagaaattcgagaaaatgctgatcgacaaactcaattatatggtggataagaagtccaacccgtgtgccacagggggcgcgctgaagggctatcagatcaccaacaagttcgagagcttcaagagcatgagcacccagaacgggtttattttctacatcccggcgtggctcacctccaagattgacccgagcaccggcttcgtgaacctcctgaagacaaagtatacctccattgccgacagcaagaagtttatctcctccttcgaccgcattatgtatgtgccggaggaggacctcttcgagttcgccctcgactacaaaaacttcagccgcacagatgcggattacatcaagaagtggaagctgtactcctacgggaacaggatccgcatcttcaggaatccaaaaaaaaataacgtctttgactgggaggaagtgtgcctgacatccgcctacaaggaactgttcaataaatacggcatcaattaccagcagggcgacattcgcgccctcctctgtgagcagtccgacaaagcgttttactccagcttcatggccctcatgtccctgatgctccaaatgaggaatagcatcacagggcgcaccgacgtcgacttcctcatcagcccggtgaagaactccgacgggatcttttacgactcccgcaactatgaggcgcaagagaatgcgatcctcccgaagaacgccgatgcgaacggggcctataatatcgccaggaaagtgctctgggccatcgggcagttcaaaaaggcggaggatgagaagctcgacaaggtgaaaattgccatttccaacaaggagtggctggagtacgcgcagacctccgtgaagcacggctcctctggcagctccggctctagcggctcctctggcagctccggctccaagctggagaagtttacaaactgttacagcctctccaaaaccctcaggtttaaagcgatcccggtgggcaagacccaggagaacatcgacaacaagaggctcctggtggaagacgagaagcgcgccgaagactacaagggcgtgaagaagctgctcgataggtactacctcagctttattaacgacgtgctgcacagcatcaaactcaagaatctcaacaactacatctccctcttccgcaaaaagacccgcaccgagaaggagaacaaggagctggagaacctggagatcaacctccgcaaggaaatcgccaaagcgttcaagggcaatgaagggtacaagagcctcttcaagaaagacatcatcgaaactatcctcccagagtttctcgatgacaaggacgagatcgcgctggtgaactcctttaacgggttcacaaccgcgtttaccggcttctttgataacagggaaaatatgttctccgaggaggccaagtccaccagcatcgccttcaggtgtatcaacgagaacctcacccgctacatttccaatatggacattttcgagaaggtggatgcgatcttcgataagcacgaggtgcaggagatcaaagagaagattctcaattccgattatgacgtcgaggatttcttcgaaggggagttctttaattttgtgctcacacaagagggcattgacgtgtacaacgcgattatcgggggcttcgtcacagagtccggggagaagattaaggggctgaatgagtacatcaatctgtacaatcagaagaccaagcagaaactgccgaaattcaagccgctctacaagcaagtcctgtccgatagggaaagcctctccttctacggcgagggctataccagcgacgaggaggtgctggaagtcttccgcaacacactgaataagaatagcgagattttctcctccatcaagaagctcgagaagctctttaagaactttgacgagtacagctccgccgggattttcgtgaagaacgggccggcgatcagcaccatctccaaggacatctttggcgagtggaacgtcatcagggacaagtggaacgccgagtacgacgacatccacctgaagaagaaggcggtggtgaccgagaagtatgaggacgatcgcaggaagtccttcaaaaaaatcggctccttcagcctcgaacagctccaggagtatgccgatgcggatctgtccgtcgtcgagaagctgaaggaaatcatcattcagaaggtcgacgagatctataaagtgtacgggtccagcgagaagctgttcgacgccgactttgtgctcgagaagtccctcaaaaagaatgacgccgtggtggccattatgaaagacctgctcgactccgtgaagtccttcgaaaattacattaaagcgttctttggggaggggaaggaaactaacagggatgagtccttctatggcgactttgtcctcgcgtacgacatcctgctgaaggtcgaccacatttacgacgcgatccgcaactacgtgacacagaagccgtactcctcaggcggaagtggtggaagtggcggtagtaccaacctcagcgacattatcgagaaggaaaccggcaagcaactcgtgatccaggagagcatactgatgctccccgaggaggtcgaggaggtgattggcaataagcccgagtccgatatactggttcatactgcgtatgacgaaagcacagacgagaacgtcatgctacttaccagcgacgccccggagtacaagccctgggccctagtcatccaagacagcaacggtgagaacaagatcaagatgctttctggcggctcaaaaagaaccgccgacggcagcgaattcgagcccaagaagaagaggaaagtcggaagcggagctactaacttcagcctgctgaagcaggctggagacgtggaggagaaccctggacctatggtgagcaagggcgaggagctgttcaccggggtggtgcccatcctggtcgagctggacggcgacgtaaacggccacaagttcagcgtgtccggcgagggcgagggcgatgccacctacggcaagctgaccctgaagttcatctgcaccaccggcaagctgcccgtgccctggcccaccctcgtgaccaccctgacctatggagtgcagtgcttcagccgctaccccgaccacatgaagcagcacgacttcttcaagtccgccatgcccgaaggctacgtccaggagcgcaccatcttcttcaaggacgacggcaactacaagacccgcgccgaggtgaagttcgagggcgacaccctggtgaaccgcatcgagctgaagggcatcgacttcaaggaggacggcaacatcctggggcacaagctggagtacaactacaacagccacaacgtctatatcatggccgacaagcagaagaacggcatcaaggtgaacttcaagatccgccacaacatcgaggacggcagcgtgcagctcgccgaccactaccagcagaacacccccatcggcgacggccccgtgctgctgcccgacaaccactacctgagcacccagtccgccctgagcaaagaccccaacgagaagcgcgatcacatggtcctgctggagttcgtgaccgccgccgggatcactctcggcatggacgagctgtacaagtctggtggttctcccaagaagaagaggaaagtctaaccggtcatcatcaccatcaccattgagtttaaacccgctgatcagcctcgactgtgccttctagttgccagccatctgttgtttgcccctcccccgtgccttccttgaccctggaaggtgccactcccactgtcctttcctaataaaatgaggaaattgcatcgcattgtctgagtaggtgtcattctattctggggggtggggtggggcaggacagcaagggggaggattgggaagacaatagcaggcatgctggggatgcggtgggctctatggcttctgaggcgaaaagaaccagctggggctcgataccgtcgacctctagctagagcttggcgtaatcatggtcatagctgtttcctgtgtgaaattgttatccgctcacaattccacacaacatacgagccggaagcataaagtgtaaagcctagggtgcctaatgagtgagctaactcacattaattgcgttgcgctcactgcccgctttccagtcgggaaacctgtcgtgccagctgcattaatgaatcggccaacgcgcgggaagaggcggtttgcgtattgggcgctcttccgcttcctcgctcactgactcgctgcgctcggtcgttcggctgcggcgagcggtatcagctcactcaaaggcggtaatacggttatccacagaatcaggggataacgcaggaaagaacatgtgagcaaaaggccagcaaaaggccaggaaccgtaaaaaggccgcgttgctggcgtttttccataggctccgcccccctgacgagcatcacaaaaatcgacgctcaagtcagaggtggcgaaacccgacaggactataaagataccaggcgtttccccctggaagctccctcgtgcgctctcctgttccgaccctgccgcttaccggatacctgtccgcctttctcccttcgggaagcgtggcgctttctcatagctcacgctgtaggtatctcagttcggtgtaggtcgttcgctccaagctgggctgtgtgcacgaaccccccgttcagcccgaccgctgcgccttatccggtaactatcgtcttgagtccaacccggtaagacacgacttatcgccactggcagcagccactggtaacaggattagcagagcgaggtatgtaggcggtgctacagagttcttgaagtggtggcctaactacggctacactagaagaacagtatttggtatctgcgctctgctgaagccagttaccttcggaaaaagagttggtagctcttgatccggcaaacaaaccaccgctggtagcggtggtttttttgtttgcaagcagcagattacgcgcagaaaaaaaggatctcaagaagatcctttgatcttttctacggggtctgacactcagtggaacgaaaactcacgttaagggattttggtcatgagattatcaaaaaggatcttcacctagatccttttaaattaaaaatgaagttttaaatcaatctaaagtatatatgagtaaacttggtctgacagttaccaatgcttaatcagtgaggcacctatctcagcgatctgtctatttcgttcatccatagttgcctgactccccgtcgtgtagataactacgatacgggagggcttaccatctggccccagtgctgcaatgataccgcgagacccacgctcaccggctccagatttatcagcaataaaccagccagccggaagggccgagcgcagaagtggtcctgcaactttatccgcctccatccagtctattaattgttgccgggaagctagagtaagtagttcgccagttaatagtttgcgcaacgttgttgccattgctacaggcatcgtggtgtcacgctcgtcgtttggtatggcttcattcagctccggttcccaacgatcaaggcgagttacatgatcccccatgttgtgcaaaaaagcggttagctccttcggtcctccgatcgttgtcagaagtaagttggccgcagtgttatcactcatggttatggcagcactgcataattctcttactgtcatgccatccgtaagatgcttttctgtgactggtgagtactcaaccaagtcattctgagaatagtgtatgcggcgaccgagttgctcttgcccggcgtcaatacgggataataccgcgccacatagcagaactttaaaagtgctcatcattggaaaacgttcttcggggcgaaaactctcaaggatcttaccgctgttgagatccagttcgatgtaacccactcgtgcacccaactgatcttcagcatcttttactttcaccagcgtttctgggtgagcaaaaacaggaaggcaaaatgccgcaaaaaagggaataagggcgacacggaaatgttgaatactcatactcttcctttttcaatattattgaagcatttatcagggttattgtctcatgagcggatacatatttgaatgtatttagaaaaataaacaaataggggttccgcgcacatttccccgaaaagtgccacctgacgtcgacggatcgggagatcgatctcccgatcccctagggtcgactctcagtacaatctgctctgatgccgcatagttaagccagtatctgctccctgcttgtgtgttggaggtcgctgagtagtgcgcgagcaaaatttaagctacaacaaggcaaggcttgaccgacaattgcatgaagaatctgcttagggttaggcgttttgcgctgcttcgcgatgtacgggcc

SEQ ID NO: 695 - DNA, 9085 bp, synthetic construct
  source 1..9085: mol_type = other DNA
agatatacgcgttgacattgattattgactagttattaatagtaatcaattacggggtcattagttcatagcccatatatggagttccgcgttacataacttacggtaaatggcccgcctggctgaccgcccaacgacccccgcccattgacgtcaataatgacgtatgttcccatagtaacgccaatagggactttccattgacgtcaatgggtggagtatttacggtaaactgcccacttggcagtacatcaagtgtatcatatgccaagtacgccccctattgacgtcaatgacggtaaatggcccgcctggcattatgcccagtacatgaccttatgggactttcctacttggcagtacatctacgtattagtcatcgctattaccatggtgatgcggttttggcagtacatcaatgggcgtggatagcggtttgactcacggggatttccaagtctccaccccattgacgtcaatgggagtttgttttggcaccaaaatcaacgggactttccaaaatgtcgtaacaactccgccccattgacgcaaatgggcggtaggcgtgtacggtgggaggtctatataagcagagctggtttagtgaaccgtcagatccgctagagatccgcggccgctaatacgactcactatagggagagccgccaccatgaaacggacagccgacggaagcgagttcgagtcaccaaagaagaagcggaaagtcgaggcctcccccgcatcaggacctagacacctgatggatccccatattttcacatctaacttcaacaacggaatcggcagacacaagacctacctgtgctatgaggtggaaaggctggataacggaacctctgtgaagatggaccagcacaggtaagtatcaaggttacaagacaggtttaaggagaccaatagaaactgggcttgtcgagacagagaagactcttgcgtttctgataggcacctattggtcttactgacatccactttgcctttctctccacaggggcttcctgcataaccaggccaagaatctgctgtgcggtttctacgggagacatgcagaactgaggtttctggatctggtgccatccctgcagctggaccccgctcagatctacagagtgacttggttcatctcttggagcccttgcttttcatggggatgtgctggcgaggtgagggccttccttcaggaaaacacacacgtgagactgaggatttttgctgccagaatctacgattatgacccactgtacaaggaagctctgcagatgctgagggatgcaggcgctcaggtgagcattatgacctatgacgaattcaagcactgctgggatacttttgtggaccatcagggttgtccttttcagccatgggatgggctggacgagcattctcaggcactgagcggtagactgagggctatcctgcagaaccaggggaattctggtggttctaaagacaagttcaagctgtacttccagaacccgcaatttatggggggctgggacaaggataaagagacagactaccgcgcgacaattctccgctatggctccaaatactatctggccatcatggacaagaagtacgcgaagtgcctgcagaagatcgacaaagacgacgtcaatggcaactatgaaaagatcaactacaagctgctgccgggcccgaacaagatgctcccgaaggtgttcttcagcaagaagtggatggcctactacaatccaagcgaggatattcagaaaatctataaaaacgggaccttcaagaagggggacatgtttaacctcaacgactgccacaagctcattgatttcttcaaggatagcatttcccgctacccgaaatggtccaatgcgtacgattttaacttctccgagacagaaaagtacaaagacatcgcgggcttttacagggaggtggaggagcaagggtataaagtttcttttgaatccgcgagcaagaaggaagtcgacaagctcgtcgaggagggcaagctctacatgttccaaatttataacaaggacttttccgacaagagccatgggaccccaaacctccacaccatgtacttcaaactgctctttgacgagaacaaccacgggcaaatcaggctgagcggcggcgccgaattattcatgcgcagggcctccctcaagaaggaagagctggtcgtccatccagccaattccccgatcgcgaacaagaacccggacaatccgaaaaagaccaccaccctgtcctacgacgtctacaaggacaaacgcttcagcgaagaccagtacgaattacacatcccaattgcgattaataagtgcccaaagaatatcttcaaaattaatacagaggtcagggtgctgctcaaacacgacgacaatccgtatgtcatcggcattgccaggggcgagcgcaatctgctctatatcgtggtcgtggatgggaagggcaatattgtggagcagtactccctgaacgagattatcaacaacttcaatgggattaggattaagaccgactatcacagcctgctcgacaagaaagaaaaagagaggtttgaggcccgccaaaactggacctccattgagaatatcaaagaattaaaggccggctatatttcccaagtcgtccacaagatctgcgagctggtggagaaatatgacgccgtgattgcgctcgaagacttaaattctgggttcaagaactcccgcgtgaaggtggaaaaacaggtgtatcagaaattcgagaaaatgctgatcgacaaactcaattatatggtggataagaagtccaacccgtgtgccacagggggcgcgctgaagggctatcagatcaccaacaagttcgagagcttcaagagcatgagcacccagaacgggtttattttctacatcccggcgtggctcacctccaagattgacccgagcaccggcttcgtgaacctcctgaagacaaagtatacctccattgccgacagcaagaagtttatctcctccttcgaccgcattatgtatgtgccggaggaggacctcttcgagttcgccctcgactacaaaaacttcagccgcacagatgcggattacatcaagaagtggaagctgtactcctacgggaacaggatccgcatcttcaggaatccaaaaaaaaataacgtctttgactgggaggaagtgtgcctgacatccgcctacaaggaactgttcaataaatacggcatcaattaccagcagggcgacattcgcgccctcctctgtgagcagtccgacaaagcgttttactccagcttcatggccctcatgtccctgatgctccaaatgaggaatagcatcacagggcgcaccgacgtcgacttcctcatcagcccggtgaagaactccgacgggatcttttacgactcccgcaactatgaggcgcaagagaatgcgatcctcccgaagaacgccgatgcgaacggggcctataatatcgccaggaaagtgctctgggccatcgggcagttcaaaaaggcggaggatgagaagctcgacaaggtgaaaattgccatttccaacaaggagtggctggagtacgcgcagacctccgtgaagcacggctcctctggcagctccggctctagcggctcctctggcagctccggctccaagctggagaagtttacaaactgttacagcctctccaaaaccctcaggtttaaagcgatcccggtgggcaagacccaggagaacatcgacaacaagaggctcctggtggaagacgagaagcgcgccgaagactacaagggcgtgaagaagctgctcgataggtactacctcagctttattaacgacgtgctgcacagcatcaaactcaagaatctcaacaactacatctccctcttccgcaaaaagacccgcaccgagaaggagaacaaggagctggagaacctggagatcaacctccgcaaggaaatcgccaaagcgttcaagggcaatgaagggtacaagagcctcttcaagaaagacatcatcgaaactatcctcccagagtttctcgatgacaaggacgagatcgcgctggtgaactcctttaacgggttcacaaccgcgtttaccggcttctttgataacagggaaaatatgttctccgaggaggccaagtccaccagcatcgccttcaggtgtatcaacgagaacctcacccgctacatttccaatatggacattttcgagaaggtggatgcgatcttcgataagcacgaggtgcaggagatcaaagagaagattctcaattccgattatgacgtcgaggatttcttcgaaggggagttctttaattttgtgctcacacaagagggcattgacgtgtacaacgcgattatcgggggcttcgtcacagagtccggggagaagattaaggggctgaatgagtacatcaatctgtacaatcagaagaccaagcagaaactgccgaaattcaagccgctctacaagcaagtcctgtccgatagggaaagcctctccttctacggcgagggctataccagcgacgaggaggtgctggaagtcttccgcaacacactgaataagaatagcgagattttctcctccatcaagaagctcgagaagctctttaagaactttgacgagtacagctccgccgggattttcgtgaagaacgggccggcgatcagcaccatctccaaggacatctttggcgagtggaacgtcatcagggacaagtggaacgccgagtacgacgacatccacctgaagaagaaggcggtggtgaccgagaagtatgaggacgatcgcaggaagtccttcaaaaaaatcggctccttcagcctcgaacagctccaggagtatgccgatgcggatctgtccgtcgtcgagaagctgaaggaaatcatcattcagaaggtcgacgagatctataaagtgtacgggtccagcgagaagctgttcgacgccgactttgtgctcgagaagtccctcaaaaagaatgacgccgtggtggccattatgaaagacctgctcgactccgtgaagtccttcgaaaattacattaaagcgttctttggggaggggaaggaaactaacagggatgagtccttctatggcgactttgtcctcgcgtacgacatcctgctgaaggtcgaccacatttacgacgcgatccgcaactacgtgacacagaagccgtactcctcaggcggaagtggtggaagtggcggtagtaccaacctcagcgacattatcgagaaggaaaccggcaagcaactcgtgatccaggagagcatactgatgctccccgaggaggtcgaggaggtgattggcaataagcccgagtccgatatactggttcatactgcgtatgacgaaagcacagacgagaacgtcatgctacttaccagcgacgccccggagtacaagccctgggccctagtcatccaagacagcaacggtgagaacaagatcaagatgctttctggcggctcaaaaagaaccgccgacggcagcgaattcgagcccaagaagaagaggaaagtcggaagcggagctactaacttcagcctgctgaagcaggctggagacgtggaggagaaccctggacctatggtgagcaagggcgaggagctgttcaccggggtggtgcccatcctggtcgagctggacggcgacgtaaacggccacaagttcagcgtgtccggcgagggcgagggcgatgccacctacggcaagctgaccctgaagttcatctgcaccaccggcaagctgcccgtgccctggcccaccctcgtgaccaccctgacctatggagtgcagtgcttcagccgctaccccgaccacatgaagcagcacgacttcttcaagtccgccatgcccgaaggctacgtccaggagcgcaccatcttcttcaaggacgacggcaactacaagacccgcgccgaggtgaagttcgagggcgacaccctggtgaaccgcatcgagctgaagggcatcgacttcaaggaggacggcaacatcctggggcacaagctggagtacaactacaacagccacaacgtctatatcatggccgacaagcagaagaacggcatcaaggtgaacttcaagatccgccacaacatcgaggacggcagcgtgcagctcgccgaccactaccagcagaacacccccatcggcgacggccccgtgctgctgcccgacaaccactacctgagcacccagtccgccctgagcaaagaccccaacgagaagcgcgatcacatggtcctgctggagttcgtgaccgccgccgggatcactctcggcatggacgagctgtacaagtctggtggttctcccaagaagaagaggaaagtctaaccggtcatcatcaccatcaccattgagtttaaacccgctgatcagcctcgactgtgccttctagttgccagccatctgttgtttgcccctcccccgtgccttccttgaccctggaaggtgccactcccactgtcctttcctaataaaatgaggaaattgcatcgcattgtctgagtaggtgtcattctattctggggggtggggtggggcaggacagcaagggggaggattgggaagacaatagcaggcatgctggggatgcggtgggctctatggcttctgaggcgaaaagaaccagctggggctcgataccgtcgacctctagctagagcttggcgtaatcatggtcatagctgtttcctgtgtgaaattgttatccgctcacaattccacacaacatacgagccggaagcataaagtgtaaagcctagggtgcctaatgagtgagctaactcacattaattgcgttgcgctcactgcccgctttccagtcgggaaacctgtcgtgccagctgcattaatgaatcggccaacgcgcgggaagaggcggtttgcgtattgggcgctcttccgcttcctcgctcactgactcgctgcgctcggtcgttcggctgcggcgagcggtatcagctcactcaaaggcggtaatacggttatccacagaatcaggggataacgcaggaaagaacatgtgagcaaaaggccagcaaaaggccaggaaccgtaaaaaggccgcgttgctggcgtttttccataggctccgcccccctgacgagcatcacaaaaatcgacgctcaagtcagaggtggcgaaacccgacaggactataaagataccaggcgtttccccctggaagctccctcgtgcgctctcctgttccgaccctgccgcttaccggatacctgtccgcctttctcccttcgggaagcgtggcgctttctcatagctcacgctgtaggtatctcagttcggtgtaggtcgttcgctccaagctgggctgtgtgcacgaaccccccgttcagcccgaccgctgcgccttatccggtaactatcgtcttgagtccaacccggtaagacacgacttatcgccactggcagcagccactggtaacaggattagcagagcgaggtatgtaggcggtgctacagagttcttgaagtggtggcctaactacggctacactagaagaacagtatttggtatctgcgctctgctgaagccagttaccttcggaaaaagagttggtagctcttgatccggcaaacaaaccaccgctggtagcggtggtttttttgtttgcaagcagcagattacgcgcagaaaaaaaggatctcaagaagatcctttgatcttttctacggggtctgacactcagtggaacgaaaactcacgttaagggattttggtcatgagattatcaaaaaggatcttcacctagatccttttaaattaaaaatgaagttttaaatcaatctaaagtatatatgagtaaacttggtctgacagttaccaatgcttaatcagtgaggcacctatctcagcgatctgtctatttcgttcatccatagttgcctgactccccgtcgtgtagataactacgatacgggagggcttaccatctggccccagtgctgcaatgataccgcgagacccacgctcaccggctccagatttatcagcaataaaccagccagccggaagggccgagcgcagaagtggtcctgcaactttatccgcctccatccagtctattaattgttgccgggaagctagagtaagtagttcgccagttaatagtttgcgcaacgttgttgccattgctacaggcatcgtggtgtcacgctcgtcgtttggtatggcttcattcagctccggttcccaacgatcaaggcgagttacatgatcccccatgttgtgcaaaaaagcggttagctccttcggtcctccgatcgttgtcagaagtaagttggccgcagtgttatcactcatggttatggcagcactgcataattctcttactgtcatgccatccgtaagatgcttttctgtgactggtgagtactcaaccaagtcattctgagaatagtgtatgcggcgaccgagttgctcttgcccggcgtcaatacgggataataccgcgccacatagcagaactttaaaagtgctcatcattggaaaacgttcttcggggcgaaaactctcaaggatcttaccgctgttgagatccagttcgatgtaacccactcgtgcacccaactgatcttcagcatcttttactttcaccagcgtttctgggtgagcaaaaacaggaaggcaaaatgccgcaaaaaagggaataagggcgacacggaaatgttgaatactcatactcttcctttttcaatattattgaagcatttatcagggttattgtctcatgagcggatacatatttgaatgtatttagaaaaataaacaaataggggttccgcgcacatttccccgaaaagtgccacctgacgtcgacggatcgggagatcgatctcccgatcccctagggtcgactctcagtacaatctgctctgatgccgcatagttaagccagtatctgctccctgcttgtgtgttggaggtcgctgagtagtgcgcgagcaaaatttaagctacaacaaggcaaggcttgaccgacaattgcatgaagaatctgcttagggttaggcgttttgcgctgcttcgcgatgtacgggcc

SEQ ID NO: 696 - DNA, 9121 bp, synthetic construct
  source 1..9121: mol_type = other DNA
agatatacgcgttgacattgattattgactagttattaatagtaatcaattacggggtcattagttcatagcccatatatggagttccgcgttacataacttacggtaaatggcccgcctggctgaccgcccaacgacccccgcccattgacgtcaataatgacgtatgttcccatagtaacgccaatagggactttccattgacgtcaatgggtggagtatttacggtaaactgcccacttggcagtacatcaagtgtatcatatgccaagtacgccccctattgacgtcaatgacggtaaatggcccgcctggcattatgcccagtacatgaccttatgggactttcctacttggcagtacatctacgtattagtcatcgctattaccatggtgatgcggttttggcagtacatcaatgggcgtggatagcggtttgactcacggggatttccaagtctccaccccattgacgtcaatgggagtttgttttggcaccaaaatcaacgggactttccaaaatgtcgtaacaactccgccccattgacgcaaatgggcggtaggcgtgtacggtgggaggtctatataagcagagctggtttagtgaaccgtcagatccgctagagatccgcggccgctaatacgactcactatagggagagccgccaccatgaaacggacagccgacggaagcgagttcgagtcaccaaagaagaagcggaaagtcgaggcctcccccgcatcaggacctagacacctgatggatccccatattttcacatctaacttcaacaacggaatcggcagacacaagacctacctgtgctatgaggtggaaaggctggataacggaacctctgtgaagatggaccagcacaggtaagtatcaaggttacaagacaggtttaaggagaccaatagaaactgggcttgtcgagacagagaagactcttgcgtttctgataggcacctattggtcttactgacatccactttgcctttctctccacaggggcttcctgcataaccaggccaagaatctgctgtgcggtttctacgggagacatgcagaactgaggtttctggatctggtgccatccctgcagctggaccccgctcagatctacagagtgacttggttcatctcttggagcccttgcttttcatggggatgtgctggcgaggtgagggccttccttcaggaaaacacacacgtgagactgaggatttttgctgccagaatctacgattatgacccactgtacaaggaagctctgcagatgctgagggatgcaggcgctcaggtgagcattatgacctatgacgaattcaagcactgctgggatacttttgtggaccatcagggttgtccttttcagccatgggatgggctggacgagcattctcaggcactgagcggtagactgagggctatcctgcagaaccaggggaatagcggcagcgagactcccgggacctcagagtccgccacacccgaaagtaaagacaagttcaagctgtacttccagaacccgcaatttatggggggctgggacaaggataaagagacagactaccgcgcgacaattctccgctatggctccaaatactatctggccatcatggacaagaagtacgcgaagtgcctgcagaagatcgacaaagacgacgtcaatggcaactatgaaaagatcaactacaagctgctgccgggcccgaacaagatgctcccgaaggtgttcttcagcaagaagtggatggcctactacaatccaagcgaggatattcagaaaatctataaaaacgggaccttcaagaagggggacatgtttaacctcaacgactgccacaagctcattgatttcttcaaggatagcatttcccgctacccgaaatggtccaatgcgtacgattttaacttctccgagacagaaaagtacaaagacatcgcgggcttttacagggaggtggaggagcaagggtataaagtttcttttgaatccgcgagcaagaaggaagtcgacaagctcgtcgaggagggcaagctctacatgttccaaatttataacaaggacttttccgacaagagccatgggaccccaaacctccacaccatgtacttcaaactgctctttgacgagaacaaccacgggcaaatcaggctgagcggcggcgccgaattattcatgcgcagggcctccctcaagaaggaagagctggtcgtccatccagccaattccccgatcgcgaacaagaacccggacaatccgaaaaagaccaccaccctgtcctacgacgtctacaaggacaaacgcttcagcgaagaccagtacgaattacacatcccaattgcgattaataagtgcccaaagaatatcttcaaaattaatacagaggtcagggtgctgctcaaacacgacgacaatccgtatgtcatcggcattgacaggggcgagcgcaatctgctctatatcgtggtcgtggatgggaagggcaatattgtggagcagtactccctgaacgagattatcaacaacttcaatgggattaggattaagaccgactatcacagcctgctcgacaagaaagaaaaagagaggtttgaggcccgccaaaactggacctccattgagaatatcaaagaattaaaggccggctatatttcccaagtcgtccacaagatctgcgagctggtggagaaatatgacgccgtgattgcgctcgaagacttaaattctgggttcaagaactcccgcgtgaaggtggaaaaacaggtgtatcagaaattcgagaaaatgctgatcgacaaactcaattatatggtggataagaagtccaacccgtgtgccacagggggcgcgctgaagggctatcagatcaccaacaagttcgagagcttcaagagcatgagcacccagaacgggtttattttctacatcccggcgtggctcacctccaagattgacccgagcaccggcttcgtgaacctcctgaagacaaagtatacctccattgccgacagcaagaagtttatctcctccttcgaccgcattatgtatgtgccggaggaggacctcttcgagttcgccctcgactacaaaaacttcagccgcacagatgcggattacatcaagaagtggaagctgtactcctacgggaacaggatccgcatcttcaggaatccaaaaaaaaataacgtctttgactgggaggaagtgtgcctgacatccgcctacaaggaactgttcaataaatacggcatcaattaccagcagggcgacattcgcgccctcctctgtgagcagtccgacaaagcgttttactccagcttcatggccctcatgtccctgatgctccaaatggccaatagcatcacagggcgcaccgacgtcgacttcctcatcagcccggtgaagaactccgacgggatcttttacgactcccgcaactatgaggcgcaagagaatgcgatcctcccgaagaacgccgatgcgaacggggcctataatatcgccaggaaagtgctctgggccatcgggcagttcaaaaaggcggaggatgagaagctcgacaaggtgaaaattgccatttccaacaaggagtggctggagtacgcgcagacctccgtgaagcacggctcctctggcagctccggctctagcggctcctctggcagctccggctccaagctggagaagtttacaaactgttacagcctctccaaaaccctcaggtttaaagcgatcccggtgggcaagacccaggagaacatcgacaacaagaggctcctggtggaagacgagaagcgcgccgaagactacaagggcgtgaagaagctgctcgataggtactacctcagctttattaacgacgtgctgcacagcatcaaactcaagaatctcaacaactacatctccctcttccgcaaaaagacccgcaccgagaaggagaacaaggagctggagaacctggagatcaacctccgcaaggaaatcgccaaagcgttcaagggcaatgaagggtacaagagcctcttcaagaaagacatcatcgaaactatcctcccagagtttctcgatgacaaggacgagatcgcgctggtgaactcctttaacgggttcacaaccgcgtttaccggcttctttgataacagggaaaatatgttctccgaggaggccaagtccaccagcatcgccttcaggtgtatcaacgagaacctcacccgctacatttccaatatggacattttcgagaaggtggatgcgatcttcgataagcacgaggtgcaggagatcaaagagaagattctcaattccgattatgacgtcgaggatttcttcgaaggggagttctttaattttgtgctcacacaagagggcattgacgtgtacaacgcgattatcgggggcttcgtcacagagtccggggagaagattaaggggctgaatgagtacatcaatctgtacaatcagaagaccaagcagaaactgccgaaattcaagccgctctacaagcaagtcctgtccgatagggaaagcctctccttctacggcgagggctataccagcgacgaggaggtgctggaagtcttccgcaacacactgaataagaatagcgagattttctcctccatcaagaagctcgagaagctctttaagaactttgacgagtacagctccgccgggattttcgtgaagaacgggccggcgatcagcaccatctccaaggacatctttggcgagtggaacgtcatcagggacaagtggaacgccgagtacgacgacatccacctgaagaagaaggcggtggtgaccgagaagtatgaggacgatcgcaggaagtccttcaaaaaaatcggctccttcagcctcgaacagctccaggagtatgccgatgcggatctgtccgtcgtcgagaagctgaaggaaatcatcattcagaaggtcgacgagatctataaagtgtacgggtccagcgagaagctgttcgacgccgactttgtgctcgagaagtccctcaaaaagaatgacgccgtggtggccattatgaaagacctgctcgactccgtgaagtccttcgaaaattacattaaagcgttctttggggaggggaaggaaactaacagggatgagtccttctatggcgactttgtcctcgcgtacgacatcctgctgaaggtcgaccacatttacgacgcgatccgcaactacgtgacacagaagccgtactcctcaggcggaagtggtggaagtggcggtagtaccaacctcagcgacattatcgagaaggaaaccggcaagcaactcgtgatccaggagagcatactgatgctccccgaggaggtcgaggaggtgattggcaataagcccgagtccgatatactggttcatactgcgtatgacgaaagcacagacgagaacgtcatgctacttaccagcgacgccccggagtacaagccctgggccctagtcatccaagacagcaacggtgagaacaagatcaagatgctttctggcggctcaaaaagaaccgccgacggcagcgaattcgagcccaagaagaagaggaaagtcggaagcggagctactaacttcagcctgctgaagcaggctggagacgtggaggagaaccctggacctatggtgagcaagggcgaggagctgttcaccggggtggtgcccatcctggtcgagctggacggcgacgtaaacggccacaagttcagcgtgtccggcgagggcgagggcgatgccacctacggcaagctgaccctgaagttcatctgcaccaccggcaagctgcccgtgccctggcccaccctcgtgaccaccctgacctatggagtgcagtgcttcagccgctaccccgaccacatgaagcagcacgacttcttcaagtccgccatgcccgaaggctacgtccaggagcgcaccatcttcttcaaggacgacggcaactacaagacccgcgccgaggtgaagttcgagggcgacaccctggtgaaccgcatcgagctgaagggcatcgacttcaaggaggacggcaacatcctggggcacaagctggagtacaactacaacagccacaacgtctatatcatggccgacaagcagaagaacggcatcaaggtgaacttcaagatccgccacaacatcgaggacggcagcgtgcagctcgccgaccactaccagcagaacacccccatcggcgacggccccgtgctgctgcccgacaaccactacctgagcacccagtccgccctgagcaaagaccccaacgagaagcgcgatcacatggtcctgctggagttcgtgaccgccgccgggatcactctcggcatggacgagctgtacaagtctggtggttctcccaagaagaagaggaaagtctaaccggtcatcatcaccatcaccattgagtttaaacccgctgatcagcctcgactgtgccttctagttgccagccatctgttgtttgcccctcccccgtgccttccttgaccctggaaggtgccactcccactgtcctttcctaataaaatgaggaaattgcatcgcattgtctgagtaggtgtcattctattctggggggtggggtggggcaggacagcaagggggaggattgggaagacaatagcaggcatgctggggatgcggtgggctctatggcttctgaggcgaaaagaaccagctggggctcgataccgtcgacctctagctagagcttggcgtaatcatggtcatagctgtttcctgtgtgaaattgttatccgctcacaattccacacaacatacgagccggaagcataaagtgtaaagcctagggtgcctaatgagtgagctaactcacattaattgcgttgcgctcactgcccgctttccagtcgggaaacctgtcgtgccagctgcattaatgaatcggccaacgcgcgggaagaggcggtttgcgtattgggcgctcttccgcttcctcgctcactgactcgctgcgctcggtcgttcggctgcggcgagcggtatcagctcactcaaaggcggtaatacggttatccacagaatcaggggataacgcaggaaagaacatgtgagcaaaaggccagcaaaaggccaggaaccgtaaaaaggccgcgttgctggcgtttttccataggctccgcccccctgacgagcatcacaaaaatcgacgctcaagtcagaggtggcgaaacccgacaggactataaagataccaggcgtttccccctggaagctccctcgtgcgctctcctgttccgaccctgccgcttaccggatacctgtccgcctttctcccttcgggaagcgtggcgctttctcatagctcacgctgtaggtatctcagttcggtgtaggtcgttcgctccaagctgggctgtgtgcacgaaccccccgttcagcccgaccgctgcgccttatccggtaactatcgtcttgagtccaacccggtaagacacgacttatcgccactggcagcagccactggtaacaggattagcagagcgaggtatgtaggcggtgctacagagttcttgaagtggtggcctaactacggctacactagaagaacagtatttggtatctgcgctctgctgaagccagttaccttcggaaaaagagttggtagctcttgatccggcaaacaaaccaccgctggtagcggtggtttttttgtttgcaagcagcagattacgcgcagaaaaaaaggatctcaagaagatcctttgatcttttctacggggtctgacactcagtggaacgaaaactcacgttaagggattttggtcatgagattatcaaaaaggatcttcacctagatccttttaaattaaaaatgaagttttaaatcaatctaaagtatatatgagtaaacttggtctgacagttaccaatgcttaatcagtgaggcacctatctcagcgatctgtctatttcgttcatccatagttgcctgactccccgtcgtgtagataactacgatacgggagggcttaccatctggccccagtgctgcaatgataccgcgagacccacgctcaccggctccagatttatcagcaataaaccagccagccggaagggccgagcgcagaagtggtcctgcaactttatccgcctccatccagtctattaattgttgccgggaagctagagtaagtagttcgccagttaatagtttgcgcaacgttgttgccattgctacaggcatcgtggtgtcacgctcgtcgtttggtatggcttcattcagctccggttcccaacgatcaaggcgagttacatgatcccccatgttgtgcaaaaaagcggttagctccttcggtcctccgatcgttgtcagaagtaagttggccgcagtgttatcactcatggttatggcagcactgcataattctcttactgtcatgccatccgtaagatgcttttctgtgactggtgagtactcaaccaagtcattctgagaatagtgtatgcggcgaccgagttgctcttgcccggcgtcaatacgggataataccgcgccacatagcagaactttaaaagtgctcatcattggaaaacgttcttcggggcgaaaactctcaaggatcttaccgctgttgagatccagttcgatgtaacccactcgtgcacccaactgatcttcagcatcttttactttcaccagcgtttctgggtgagcaaaaacaggaaggcaaaatgccgcaaaaaagggaataagggcgacacggaaatgttgaatactcatactcttcctttttcaatattattgaagcatttatcagggttattgtctcatgagcggatacatatttgaatgtatttagaaaaataaacaaataggggttccgcgcacatttccccgaaaagtgccacctgacgtcgacggatcgggagatcgatctcccgatcccctagggtcgactctcagtacaatctgctctgatgccgcatagttaagccagtatctgctccctgcttgtgtgttggaggtcgctgagtagtgcgcgagcaaaatttaagctacaacaaggcaaggcttgaccgacaattgcatgaagaatctgcttagggttaggcgttttgcgctgcttcgcgatgtacgggcc

SEQ ID NO: 697 - DNA, 9109 bp, synthetic construct
  source 1..9109: mol_type = other DNA
agatatacgcgttgacattgattattgactagttattaatagtaatcaattacggggtcattagttcatagcccatatatggagttccgcgttacataacttacggtaaatggcccgcctggctgaccgcccaacgacccccgcccattgacgtcaataatgacgtatgttcccatagtaacgccaatagggactttccattgacgtcaatgggtggagtatttacggtaaactgcccacttggcagtacatcaagtgtatcatatgccaagtacgccccctattgacgtcaatgacggtaaatggcccgcctggcattatgcccagtacatgaccttatgggactttcctacttggcagtacatctacgtattagtcatcgctattaccatggtgatgcggttttggcagtacatcaatgggcgtggatagcggtttgactcacggggatttccaagtctccaccccattgacgtcaatgggagtttgttttggcaccaaaatcaacgggactttccaaaatgtcgtaacaactccgccccattgacgcaaatgggcggtaggcgtgtacggtgggaggtctatataagcagagctggtttagtgaaccgtcagatccgctagagatccgcggccgctaatacgactcactatagggagagccgccaccatgaaacggacagccgacggaagcgagttcgagtcaccaaagaagaagcggaaagtcgaggcctcccccgcatcaggacctagacacctgatggatccccatattttcacatctaacttcaacaacggaatcggcagacacaagacctacctgtgctatgaggtggaaaggctggataacggaacctctgtgaagatggaccagcacaggtaagtatcaaggttacaagacaggtttaaggagaccaatagaaactgggcttgtcgagacagagaagactcttgcgtttctgataggcacctattggtcttactgacatccactttgcctttctctccacaggggcttcctgcataaccaggccaagaatctgctgtgcggtttctacgggagacatgcagaactgaggtttctggatctggtgccatccctgcagctggaccccgctcagatctacagagtgacttggttcatctcttggagcccttgcttttcatggggatgtgctggcgaggtgagggccttccttcaggaaaacacacacgtgagactgaggatttttgctgccagaatctacgattatgacccactgtacaaggaagctctgcagatgctgagggatgcaggcgctcaggtgagcattatgacctatgacgaattcaagcactgctgggatacttttgtggaccatcagggttgtccttttcagccatgggatgggctggacgagcattctcaggcactgagcggtagactgagggctatcctgcagaaccaggggaattctggtggttcttctggtggttcttctggtggttctaaagacaagttcaagctgtacttccagaacccgcaatttatggggggctgggacaaggataaagagacagactaccgcgcgacaattctccgctatggctccaaatactatctggccatcatggacaagaagtacgcgaagtgcctgcagaagatcgacaaagacgacgtcaatggcaactatgaaaagatcaactacaagctgctgccgggcccgaacaagatgctcccgaaggtgttcttcagcaagaagtggatggcctactacaatccaagcgaggatattcagaaaatctataaaaacgggaccttcaagaagggggacatgtttaacctcaacgactgccacaagctcattgatttcttcaaggatagcatttcccgctacccgaaatggtccaatgcgtacgattttaacttctccgagacagaaaagtacaaagacatcgcgggcttttacagggaggtggaggagcaagggtataaagtttcttttgaatccgcgagcaagaaggaagtcgacaagctcgtcgaggagggcaagctctacatgttccaaatttataacaaggacttttccgacaagagccatgggaccccaaacctccacaccatgtacttcaaactgctctttgacgagaacaaccacgggcaaatcaggctgagcggcggcgccgaattattcatgcgcagggcctccctcaagaaggaagagctggtcgtccatccagccaattccccgatcgcgaacaagaacccggacaatccgaaaaagaccaccaccctgtcctacgacgtctacaaggacaaacgcttcagcgaagaccagtacgaattacacatcccaattgcgattaataagtgcccaaagaatatcttcaaaattaatacagaggtcagggtgctgctcaaacacgacgacaatccgtatgtcatcggcattgacaggggcgagcgcaatctgctctatatcgtggtcgtggatgggaagggcaatattgtggagcagtactccctgaacgagattatcaacaacttcaatgggattaggattaagaccgactatcacagcctgctcgacaagaaagaaaaagagaggtttgaggcccgccaaaactggacctccattgagaatatcaaagaattaaaggccggctatatttcccaagtcgtccacaagatctgcgagctggtggagaaatatgacgccgtgattgcgctcgaagacttaaattctgggttcaagaactcccgcgtgaaggtggaaaaacaggtgtatcagaaattcgagaaaatgctgatcgacaaactcaattatatggtggataagaagtccaacccgtgtgccacagggggcgcgctgaagggctatcagatcaccaacaagttcgagagcttcaagagcatgagcacccagaacgggtttattttctacatcccggcgtggctcacctccaagattgacccgagcaccggcttcgtgaacctcctgaagacaaagtatacctccattgccgacagcaagaagtttatctcctccttcgaccgcattatgtatgtgccggaggaggacctcttcgagttcgccctcgactacaaaaacttcagccgcacagatgcggattacatcaagaagtggaagctgtactcctacgggaacaggatccgcatcttcaggaatccaaaaaaaaataacgtctttgactgggaggaagtgtgcctgacatccgcctacaaggaactgttcaataaatacggcatcaattaccagcagggcgacattcgcgccctcctctgtgagcagtccgacaaagcgttttactccagcttcatggccctcatgtccctgatgctccaaatggccaatagcatcacagggcgcaccgacgtcgacttcctcatcagcccggtgaagaactccgacgggatcttttacgactcccgcaactatgaggcgcaagagaatgcgatcctcccgaagaacgccgatgcgaacggggcctataatatcgccaggaaagtgctctgggccatcgggcagttcaaaaaggcggaggatgagaagctcgacaaggtgaaaattgccatttccaacaaggagtggctggagtacgcgcagacctccgtgaagcacggctcctctggcagctccggctctagcggctcctctggcagctccggctccaagctggagaagtttacaaactgttacagcctctccaaaaccctcaggtttaaagcgatcccggtgggcaagacccaggagaacatcgacaacaagaggctcctggtggaagacgagaagcgcgccgaagactacaagggcgtgaagaagctgctcgataggtactacctcagctttattaacgacgtgctgcacagcatcaaactcaagaatctcaacaactacatctccctcttccgcaaaaagacccgcaccgagaaggagaacaaggagctggagaacctggagatcaacctccgcaaggaaatcgccaaagcgttcaagggcaatgaagggtacaagagcctcttcaagaaagacatcatcgaaactatcctcccagagtttctcgatgacaaggacgagatcgcgctggtgaactcctttaacgggttcacaaccgcgtttaccggcttctttgataacagggaaaatatgttctccgaggaggccaagtccaccagcatcgccttcaggtgtatcaacgagaacctcacccgctacatttccaatatggacattttcgagaaggtggatgcgatcttcgataagcacgaggtgcaggagatcaaagagaagattctcaattccgattatgacgtcgaggatttcttcgaaggggagttctttaattttgtgctcacacaagagggcattgacgtgtacaacgcgattatcgggggcttcgtcacagagtccggggagaagattaaggggctgaatgagtacatcaatctgtacaatcagaagaccaagcagaaactgccgaaattcaagccgctctacaagcaagtcctgtccgatagggaaagcctctccttctacggcgagggctataccagcgacgaggaggtgctggaagtcttccgcaacacactgaataagaatagcgagattttctcctccatcaagaagctcgagaagctctttaagaactttgacgagtacagctccgccgggattttcgtgaagaacgggccggcgatcagcaccatctccaaggacatctttggcgagtggaacgtcatcagggacaagtggaacgccgagtacgacgacatccacctgaagaagaaggcggtggtgaccgagaagtatgaggacgatcgcaggaagtccttcaaaaaaatcggctccttcagcctcgaacagctccaggagtatgccgatgcggatctgtccgtcgtcgagaagctgaaggaaatcatcattcagaaggtcgacgagatctataaagtgtacgggtccagcgagaagctgttcgacgccgactttgtgctcgagaagtccctcaaaaagaatgacgccgtggtggccattatgaaagacctgctcgactccgtgaagtccttcgaaaattacattaaagcgttctttggggaggggaaggaaactaacagggatgagtccttctatggcgactttgtcctcgcgtacgacatcctgctgaaggtcgaccacatttacgacgcgatccgcaactacgtgacacagaagccgtactcctcaggcggaagtggtggaagtggcggtagtaccaacctcagcgacattatcgagaaggaaaccggcaagcaactcgtgatccaggagagcatactgatgctccccgaggaggtcgaggaggtgattggcaataagcccgagtccgatatactggttcatactgcgtatgacgaaagcacagacgagaacgtcatgctacttaccagcgacgccccggagtacaagccctgggccctagtcatccaagacagcaacggtgagaacaagatcaagatgctttctggcggctcaaaaagaaccgccgacggcagcgaattcgagcccaagaagaagaggaaagtcggaagcggagctactaacttcagcctgctgaagcaggctggagacgtggaggagaaccctggacctatggtgagcaagggcgaggagctgttcaccggggtggtgcccatcctggtcgagctggacggcgacgtaaacggccacaagttcagcgtgtccggcgagggcgagggcgatgccacctacggcaagctgaccctgaagttcatctgcaccaccggcaagctgcccgtgccctggcccaccctcgtgaccaccctgacctatggagtgcagtgcttcagccgctaccccgaccacatgaagcagcacgacttcttcaagtccgccatgcccgaaggctacgtccaggagcgcaccatcttcttcaaggacgacggcaactacaagacccgcgccgaggtgaagttcgagggcgacaccctggtgaaccgcatcgagctgaagggcatcgacttcaaggaggacggcaacatcctggggcacaagctggagtacaactacaacagccacaacgtctatatcatggccgacaagcagaagaacggcatcaaggtgaacttcaagatccgccacaacatcgaggacggcagcgtgcagctcgccgaccactaccagcagaacacccccatcggcgacggccccgtgctgctgcccgacaaccactacctgagcacccagtccgccctgagcaaagaccccaacgagaagcgcgatcacatggtcctgctggagttcgtgaccgccgccgggatcactctcggcatggacgagctgtacaagtctggtggttctcccaagaagaagaggaaagtctaaccggtcatcatcaccatcaccattgagtttaaacccgctgatcagcctcgactgtgccttctagttgccagccatctgttgtttgcccctcccccgtgccttccttgaccctggaaggtgccactcccactgtcctttcctaataaaatgaggaaattgcatcgcattgtctgagtaggtgtcattctattctggggggtggggtggggcaggacagcaagggggaggattgggaagacaatagcaggcatgctggggatgcggtgggctctatggcttctgaggcgaaaagaaccagctggggctcgataccgtcgacctctagctagagcttggcgtaatcatggtcatagctgtttcctgtgtgaaattgttatccgctcacaattccacacaacatacgagccggaagcataaagtgtaaagcctagggtgcctaatgagtgagctaactcacattaattgcgttgcgctcactgcccgctttccagtcgggaaacctgtcgtgccagctgcattaatgaatcggccaacgcgcgggaagaggcggtttgcgtattgggcgctcttccgcttcctcgctcactgactcgctgcgctcggtcgttcggctgcggcgagcggtatcagctcactcaaaggcggtaatacggttatccacagaatcaggggataacgcaggaaagaacatgtgagcaaaaggccagcaaaaggccaggaaccgtaaaaaggccgcgttgctggcgtttttccataggctccgcccccctgacgagcatcacaaaaatcgacgctcaagtcagaggtggcgaaacccgacaggactataaagataccaggcgtttccccctggaagctccctcgtgcgctctcctgttccgaccctgccgcttaccggatacctgtccgcctttctcccttcgggaagcgtggcgctttctcatagctcacgctgtaggtatctcagttcggtgtaggtcgttcgctccaagctgggctgtgtgcacgaaccccccgttcagcccgaccgctgcgccttatccggtaactatcgtcttgagtccaacccggtaagacacgacttatcgccactggcagcagccactggtaacaggattagcagagcgaggtatgtaggcggtgctacagagttcttgaagtggtggcctaactacggctacactagaagaacagtatttggtatctgcgctctgctgaagccagttaccttcggaaaaagagttggtagctcttgatccggcaaacaaaccaccgctggtagcggtggtttttttgtttgcaagcagcagattacgcgcagaaaaaaaggatctcaagaagatcctttgatcttttctacggggtctgacactcagtggaacgaaaactcacgttaagggattttggtcatgagattatcaaaaaggatcttcacctagatccttttaaattaaaaatgaagttttaaatcaatctaaagtatatatgagtaaacttggtctgacagttaccaatgcttaatcagtgaggcacctatctcagcgatctgtctatttcgttcatccatagttgcctgactccccgtcgtgtagataactacgatacgggagggcttaccatctggccccagtgctgcaatgataccgcgagacccacgctcaccggctccagatttatcagcaataaaccagccagccggaagggccgagcgcagaagtggtcctgcaactttatccgcctccatccagtctattaattgttgccgggaagctagagtaagtagttcgccagttaatagtttgcgcaacgttgttgccattgctacaggcatcgtggtgtcacgctcgtcgtttggtatggcttcattcagctccggttcccaacgatcaaggcgagttacatgatcccccatgttgtgcaaaaaagcggttagctccttcggtcctccgatcgttgtcagaagtaagttggccgcagtgttatcactcatggttatggcagcactgcataattctcttactgtcatgccatccgtaagatgcttttctgtgactggtgagtactcaaccaagtcattctgagaatagtgtatgcggcgaccgagttgctcttgcccggcgtcaatacgggataataccgcgccacatagcagaactttaaaagtgctcatcattggaaaacgttcttcggggcgaaaactctcaaggatcttaccgctgttgagatccagttcgatgtaacccactcgtgcacccaactgatcttcagcatcttttactttcaccagcgtttctgggtgagcaaaaacaggaaggcaaaatgccgcaaaaaagggaataagggcgacacggaaatgttgaatactcatactcttcctttttcaatattattgaagcatttatcagggttattgtctcatgagcggatacatatttgaatgtatttagaaaaataaacaaataggggttccgcgcacatttccccgaaaagtgccacctgacgtcgacggatcgggagatcgatctcccgatcccctagggtcgactctcagtacaatctgctctgatgccgcatagttaagccagtatctgctccctgcttgtgtgttggaggtcgctgagtagtgcgcgagcaaaatttaagctacaacaaggcaaggcttgaccgacaattgcatgaagaatctgcttagggttaggcgttttgcgctgcttcgcgatgtacgggcc

SEQ ID NO: 698 - DNA, 9097 bp, synthetic construct
  source 1..9097: mol_type = other DNA
agatatacgcgttgacattgattattgactagttattaatagtaatcaattacggggtcattagttcatagcccatatatggagttccgcgttacataacttacggtaaatggcccgcctggctgaccgcccaacgacccccgcccattgacgtcaataatgacgtatgttcccatagtaacgccaatagggactttccattgacgtcaatgggtggagtatttacggtaaactgcccacttggcagtacatcaagtgtatcatatgccaagtacgccccctattgacgtcaatgacggtaaatggcccgcctggcattatgcccagtacatgaccttatgggactttcctacttggcagtacatctacgtattagtcatcgctattaccatggtgatgcggttttggcagtacatcaatgggcgtggatagcggtttgactcacggggatttccaagtctccaccccattgacgtcaatgggagtttgttttggcaccaaaatcaacgggactttccaaaatgtcgtaacaactccgccccattgacgcaaatgggcggtaggcgtgtacggtgggaggtctatataagcagagctggtttagtgaaccgtcagatccgctagagatccgcggccgctaatacgactcactatagggagagccgccaccatgaaacggacagccgacggaagcgagttcgagtcaccaaagaagaagcggaaagtcgaggcctcccccgcatcaggacctagacacctgatggatccccatattttcacatctaacttcaacaacggaatcggcagacacaagacctacctgtgctatgaggtggaaaggctggataacggaacctctgtgaagatggaccagcacaggtaagtatcaaggttacaagacaggtttaaggagaccaatagaaactgggcttgtcgagacagagaagactcttgcgtttctgataggcacctattggtcttactgacatccactttgcctttctctccacaggggcttcctgcataaccaggccaagaatctgctgtgcggtttctacgggagacatgcagaactgaggtttctggatctggtgccatccctgcagctggaccccgctcagatctacagagtgacttggttcatctcttggagcccttgcttttcatggggatgtgctggcgaggtgagggccttccttcaggaaaacacacacgtgagactgaggatttttgctgccagaatctacgattatgacccactgtacaaggaagctctgcagatgctgagggatgcaggcgctcaggtgagcattatgacctatgacgaattcaagcactgctgggatacttttgtggaccatcagggttgtccttttcagccatgggatgggctggacgagcattctcaggcactgagcggtagactgagggctatcctgcagaaccaggggaattctggtggttcttctggtggttctaaagacaagttcaagctgtacttccagaacccgcaatttatggggggctgggacaaggataaagagacagactaccgcgcgacaattctccgctatggctccaaatactatctggccatcatggacaagaagtacgcgaagtgcctgcagaagatcgacaaagacgacgtcaatggcaactatgaaaagatcaactacaagctgctgccgggcccgaacaagatgctcccgaaggtgttcttcagcaagaagtggatggcctactacaatccaagcgaggatattcagaaaatctataaaaacgggaccttcaagaagggggacatgtttaacctcaacgactgccacaagctcattgatttcttcaaggatagcatttcccgctacccgaaatggtccaatgcgtacgattttaacttctccgagacagaaaagtacaaagacatcgcgggcttttacagggaggtggaggagcaagggtataaagtttcttttgaatccgcgagcaagaaggaagtcgacaagctcgtcgaggagggcaagctctacatgttccaaatttataacaaggacttttccgacaagagccatgggaccccaaacctccacaccatgtacttcaaactgctctttgacgagaacaaccacgggcaaatcaggctgagcggcggcgccgaattattcatgcgcagggcctccctcaagaaggaagagctggtcgtccatccagccaattccccgatcgcgaacaagaacccggacaatccgaaaaagaccaccaccctgtcctacgacgtctacaaggacaaacgcttcagcgaagaccagtacgaattacacatcccaattgcgattaataagtgcccaaagaatatcttcaaaattaatacagaggtcagggtgctgctcaaacacgacgacaatccgtatgtcatcggcattgacaggggcgagcgcaatctgctctatatcgtggtcgtggatgggaagggcaatattgtggagcagtactccctgaacgagattatcaacaacttcaatgggattaggattaagaccgactatcacagcctgctcgacaagaaagaaaaagagaggtttgaggcccgccaaaactggacctccattgagaatatcaaagaattaaaggccggctatatttcccaagtcgtccacaagatctgcgagctggtggagaaatatgacgccgtgattgcgctcgaagacttaaattctgggttcaagaactcccgcgtgaaggtggaaaaacaggtgtatcagaaattcgagaaaatgctgatcgacaaactcaattatatggtggataagaagtccaacccgtgtgccacagggggcgcgctgaagggctatcagatcaccaacaagttcgagagcttcaagagcatgagcacccagaacgggtttattttctacatcccggcgtggctcacctccaagattgacccgagcaccggcttcgtgaacctcctgaagacaaagtatacctccattgccgacagcaagaagtttatctcctccttcgaccgcattatgtatgtgccggaggaggacctcttcgagttcgccctcgactacaaaaacttcagccgcacagatgcggattacatcaagaagtggaagctgtactcctacgggaacaggatccgcatcttcaggaatccaaaaaaaaataacgtctttgactgggaggaagtgtgcctgacatccgcctacaaggaactgttcaataaatacggcatcaattaccagcagggcgacattcgcgccctcctctgtgagcagtccgacaaagcgttttactccagcttcatggccctcatgtccctgatgctccaaatggccaatagcatcacagggcgcaccgacgtcgacttcctcatcagcccggtgaagaactccgacgggatcttttacgactcccgcaactatgaggcgcaagagaatgcgatcctcccgaagaacgccgatgcgaacggggcctataatatcgccaggaaagtgctctgggccatcgggcagttcaaaaaggcggaggatgagaagctcgacaaggtgaaaattgccatttccaacaaggagtggctggagtacgcgcagacctccgtgaagcacggctcctctggcagctccggctctagcggctcctctggcagctccggctccaagctggagaagtttacaaactgttacagcctctccaaaaccctcaggtttaaagcgatcccggtgggcaagacccaggagaacatcgacaacaagaggctcctggtggaagacgagaagcgcgccgaagactacaagggcgtgaagaagctgctcgataggtactacctcagctttattaacgacgtgctgcacagcatcaaactcaagaatctcaacaactacatctccctcttccgcaaaaagacccgcaccgagaaggagaacaaggagctggagaacctggagatcaacctccgcaaggaaatcgccaaagcgttcaagggcaatgaagggtacaagagcctcttcaagaaagacatcatcgaaactatcctcccagagtttctcgatgacaaggacgagatcgcgctggtgaactcctttaacgggttcacaaccgcgtttaccggcttctttgataacagggaaaatatgttctccgaggaggccaagtccaccagcatcgccttcaggtgtatcaacgagaacctcacccgctacatttccaatatggacattttcgagaaggtggatgcgatcttcgataagcacgaggtgcaggagatcaaagagaagattctcaattccgattatgacgtcgaggatttcttcgaaggggagttctttaattttgtgctcacacaagagggcattgacgtgtacaacgcgattatcgggggcttcgtcacagagtccggggagaagattaaggggctgaatgagtacatcaatctgtacaatcagaagaccaagcagaaactgccgaaattcaagccgctctacaagcaagtcctgtccgatagggaaagcctctccttctacggcgagggctataccagcgacgaggaggtgctggaagtcttccgcaacacactgaataagaatagcgagattttctcctccatcaagaagctcgagaagctctttaagaactttgacgagtacagctccgccgggattttcgtgaagaacgggccggcgatcagcaccatctccaaggacatctttggcgagtggaacgtcatcagggacaagtggaacgccgagtacgacgacatccacctgaagaagaaggcggtggtgaccgagaagtatgaggacgatcgcaggaagtccttcaaaaaaatcggctccttcagcctcgaacagctccaggagtatgccgatgcggatctgtccgtcgtcgagaagctgaaggaaatcatcattcagaaggtcgacgagatctataaagtgtacgggtccagcgagaagctgttcgacgccgactttgtgctcgagaagtccctcaaaaagaatgacgccgtggtggccattatgaaagacctgctcgactccgtgaagtccttcgaaaattacattaaagcgttctttggggaggggaaggaaactaacagggatgagtccttctatggcgactttgtcctcgcgtacgacatcctgctgaaggtcgaccacatttacgacgcgatccgcaactacgtgacacagaagccgtactcctcaggcggaagtggtggaagtggcggtagtaccaacctcagcgacattatcgagaaggaaaccggcaagcaactcgtgatccaggagagcatactgatgctccccgaggaggtcgaggaggtgattggcaataagcccgagtccgatatactggttcatactgcgtatgacgaaagcacagacgagaacgtcatgctacttaccagcgacgccccggagtacaagccctgggccctagtcatccaagacagcaacggtgagaacaagatcaagatgctttctggcggctcaaaaagaaccgccgacggcagcgaattcgagcccaagaagaagaggaaagtcggaagcggagctactaacttcagcctgctgaagcaggctggagacgtggaggagaaccctggacctatggtgagcaagggcgaggagctgttcaccggggtggtgcccatcctggtcgagctggacggcgacgtaaacggccacaagttcagcgtgtccggcgagggcgagggcgatgccacctacggcaagctgaccctgaagttcatctgcaccaccggcaagctgcccgtgccctggcccaccctcgtgaccaccctgacctatggagtgcagtgcttcagccgctaccccgaccacatgaagcagcacgacttcttcaagtccgccatgcccgaaggctacgtccaggagcgcaccatcttcttcaaggacgacggcaactacaagacccgcgccgaggtgaagttcgagggcgacaccctggtgaaccgcatcgagctgaagggcatcgacttcaaggaggacggcaacatcctggggcacaagctggagtacaactacaacagccacaacgtctatatcatggccgacaagcagaagaacggcatcaaggtgaacttcaagatccgccacaacatcgaggacggcagcgtgcagctcgccgaccactaccagcagaacacccccatcggcgacggccccgtgctgctgcccgacaaccactacctgagcacccagtccgccctgagcaaagaccccaacgagaagcgcgatcacatggtcctgctggagttcgtgaccgccgccgggatcactctcggcatggacgagctgtacaagtctggtggttctcccaagaagaagaggaaagtctaaccggtcatcatcaccatcaccattgagtttaaacccgctgatcagcctcgactgtgccttctagttgccagccatctgttgtttgcccctcccccgtgccttccttgaccctggaaggtgccactcccactgtcctttcctaataaaatgaggaaattgcatcgcattgtctgagtaggtgtcattctattctggggggtggggtggggcaggacagcaagggggaggattgggaagacaatagcaggcatgctggggatgcggtgggctctatggcttctgaggcgaaaagaaccagctggggctcgataccgtcgacctctagctagagcttggcgtaatcatggtcatagctgtttcctgtgtgaaattgttatccgctcacaattccacacaacatacgagccggaagcataaagtgtaaagcctagggtgcctaatgagtgagctaactcacattaattgcgttgcgctcactgcccgctttccagtcgggaaacctgtcgtgccagctgcattaatgaatcggccaacgcgcgggaagaggcggtttgcgtattgggcgctcttccgcttcctcgctcactgactcgctgcgctcggtcgttcggctgcggcgagcggtatcagctcactcaaaggcggtaatacggttatccacagaatcaggggataacgcaggaaagaacatgtgagcaaaaggccagcaaaaggccaggaaccgtaaaaaggccgcgttgctggcgtttttccataggctccgcccccctgacgagcatcacaaaaatcgacgctcaagtcagaggtggcgaaacccgacaggactataaagataccaggcgtttccccctggaagctccctcgtgcgctctcctgttccgaccctgccgcttaccggatacctgtccgcctttctcccttcgggaagcgtggcgctttctcatagctcacgctgtaggtatctcagttcggtgtaggtcgttcgctccaagctgggctgtgtgcacgaaccccccgttcagcccgaccgctgcgccttatccggtaactatcgtcttgagtccaacccggtaagacacgacttatcgccactggcagcagccactggtaacaggattagcagagcgaggtatgtaggcggtgctacagagttcttgaagtggtggcctaactacggctacactagaagaacagtatttggtatctgcgctctgctgaagccagttaccttcggaaaaagagttggtagctcttgatccggcaaacaaaccaccgctggtagcggtggtttttttgtttgcaagcagcagattacgcgcagaaaaaaaggatctcaagaagatcctttgatcttttctacggggtctgacactcagtggaacgaaaactcacgttaagggattttggtcatgagattatcaaaaaggatcttcacctagatccttttaaattaaaaatgaagttttaaatcaatctaaagtatatatgagtaaacttggtctgacagttaccaatgcttaatcagtgaggcacctatctcagcgatctgtctatttcgttcatccatagttgcctgactccccgtcgtgtagataactacgatacgggagggcttaccatctggccccagtgctgcaatgataccgcgagacccacgctcaccggctccagatttatcagcaataaaccagccagccggaagggccgagcgcagaagtggtcctgcaactttatccgcctccatccagtctattaattgttgccgggaagctagagtaagtagttcgccagttaatagtttgcgcaacgttgttgccattgctacaggcatcgtggtgtcacgctcgtcgtttggtatggcttcattcagctccggttcccaacgatcaaggcgagttacatgatcccccatgttgtgcaaaaaagcggttagctccttcggtcctccgatcgttgtcagaagtaagttggccgcagtgttatcactcatggttatggcagcactgcataattctcttactgtcatgccatccgtaagatgcttttctgtgactggtgagtactcaaccaagtcattctgagaatagtgtatgcggcgaccgagttgctcttgcccggcgtcaatacgggataataccgcgccacatagcagaactttaaaagtgctcatcattggaaaacgttcttcggggcgaaaactctcaaggatcttaccgctgttgagatccagttcgatgtaacccactcgtgcacccaactgatcttcagcatcttttactttcaccagcgtttctgggtgagcaaaaacaggaaggcaaaatgccgcaaaaaagggaataagggcgacacggaaatgttgaatactcatactcttcctttttcaatattattgaagcatttatcagggttattgtctcatgagcggatacatatttgaatgtatttagaaaaataaacaaataggggttccgcgcacatttccccgaaaagtgccacctgacgtcgacggatcgggagatcgatctcccgatcccctagggtcgactctcagtacaatctgctctgatgccgcatagttaagccagtatctgctccctgcttgtgtgttggaggtcgctgagtagtgcgcgagcaaaatttaagctacaacaaggcaaggcttgaccgacaattgcatgaagaatctgcttagggttaggcgttttgcgctgcttcgcgatgtacgggcc

SEQ ID NO: 699 - DNA, 9091 bp, synthetic construct
  source 1..9091: mol_type = other DNA
agatatacgcgttgacattgattattgactagttattaatagtaatcaattacggggtcattagttcatagcccatatatggagttccgcgttacataacttacggtaaatggcccgcctggctgaccgcccaacgacccccgcccattgacgtcaataatgacgtatgttcccatagtaacgccaatagggactttccattgacgtcaatgggtggagtatttacggtaaactgcccacttggcagtacatcaagtgtatcatatgccaagtacgccccctattgacgtcaatgacggtaaatggcccgcctggcattatgcccagtacatgaccttatgggactttcctacttggcagtacatctacgtattagtcatcgctattaccatggtgatgcggttttggcagtacatcaatgggcgtggatagcggtttgactcacggggatttccaagtctccaccccattgacgtcaatgggagtttgttttggcaccaaaatcaacgggactttccaaaatgtcgtaacaactccgccccattgacgcaaatgggcggtaggcgtgtacggtgggaggtctatataagcagagctggtttagtgaaccgtcagatccgctagagatccgcggccgctaatacgactcactatagggagagccgccaccatgaaacggacagccgacggaagcgagttcgagtcaccaaagaagaagcggaaagtcgaggcctcccccgcatcaggacctagacacctgatggatccccatattttcacatctaacttcaacaacggaatcggcagacacaagacctacctgtgctatgaggtggaaaggctggataacggaacctctgtgaagatggaccagcacaggtaagtatcaaggttacaagacaggtttaaggagaccaatagaaactgggcttgtcgagacagagaagactcttgcgtttctgataggcacctattggtcttactgacatccactttgcctttctctccacaggggcttcctgcataaccaggccaagaatctgctgtgcggtttctacgggagacatgcagaactgaggtttctggatctggtgccatccctgcagctggaccccgctcagatctacagagtgacttggttcatctcttggagcccttgcttttcatggggatgtgctggcgaggtgagggccttccttcaggaaaacacacacgtgagactgaggatttttgctgccagaatctacgattatgacccactgtacaaggaagctctgcagatgctgagggatgcaggcgctcaggtgagcattatgacctatgacgaattcaagcactgctgggatacttttgtggaccatcagggttgtccttttcagccatgggatgggctggacgagcattctcaggcactgagcggtagactgagggctatcctgcagaaccaggggaattctggttcttctggttctaaagacaagttcaagctgtacttccagaacccgcaatttatggggggctgggacaaggataaagagacagactaccgcgcgacaattctccgctatggctccaaatactatctggccatcatggacaagaagtacgcgaagtgcctgcagaagatcgacaaagacgacgtcaatggcaactatgaaaagatcaactacaagctgctgccgggcccgaacaagatgctcccgaaggtgttcttcagcaagaagtggatggcctactacaatccaagcgaggatattcagaaaatctataaaaacgggaccttcaagaagggggacatgtttaacctcaacgactgccacaagctcattgatttcttcaaggatagcatttcccgctacccgaaatggtccaatgcgtacgattttaacttctccgagacagaaaagtacaaagacatcgcgggcttttacagggaggtggaggagcaagggtataaagtttcttttgaatccgcgagcaagaaggaagtcgacaagctcgtcgaggagggcaagctctacatgttccaaatttataacaaggacttttccgacaagagccatgggaccccaaacctccacaccatgtacttcaaactgctctttgacgagaacaaccacgggcaaatcaggctgagcggcggcgccgaattattcatgcgcagggcctccctcaagaaggaagagctggtcgtccatccagccaattccccgatcgcgaacaagaacccggacaatccgaaaaagaccaccaccctgtcctacgacgtctacaaggacaaacgcttcagcgaagaccagtacgaattacacatcccaattgcgattaataagtgcccaaagaatatcttcaaaattaatacagaggtcagggtgctgctcaaacacgacgacaatccgtatgtcatcggcattgacaggggcgagcgcaatctgctctatatcgtggtcgtggatgggaagggcaatattgtggagcagtactccctgaacgagattatcaacaacttcaatgggattaggattaagaccgactatcacagcctgctcgacaagaaagaaaaagagaggtttgaggcccgccaaaactggacctccattgagaatatcaaagaattaaaggccggctatatttcccaagtcgtccacaagatctgcgagctggtggagaaatatgacgccgtgattgcgctcgaagacttaaattctgggttcaagaactcccgcgtgaaggtggaaaaacaggtgtatcagaaattcgagaaaatgctgatcgacaaactcaattatatggtggataagaagtccaacccgtgtgccacagggggcgcgctgaagggctatcagatcaccaacaagttcgagagcttcaagagcatgagcacccagaacgggtttattttctacatcccggcgtggctcacctccaagattgacccgagcaccggcttcgtgaacctcctgaagacaaagtatacctccattgccgacagcaagaagtttatctcctccttcgaccgcattatgtatgtgccggaggaggacctcttcgagttcgccctcgactacaaaaacttcagccgcacagatgcggattacatcaagaagtggaagctgtactcctacgggaacaggatccgcatcttcaggaatccaaaaaaaaataacgtctttgactgggaggaagtgtgcctgacatccgcctacaaggaactgttcaataaatacggcatcaattaccagcagggcgacattcgcgccctcctctgtgagcagtccgacaaagcgttttactccagcttcatggccctcatgtccctgatgctccaaatggccaatagcatcacagggcgcaccgacgtcgacttcctcatcagcccggtgaagaactccgacgggatcttttacgactcccgcaactatgaggcgcaagagaatgcgatcctcccgaagaacgccgatgcgaacggggcctataatatcgccaggaaagtgctctgggccatcgggcagttcaaaaaggcggaggatgagaagctcgacaaggtgaaaattgccatttccaacaaggagtggctggagtacgcgcagacctccgtgaagcacggctcctctggcagctccggctctagcggctcctctggcagctccggctccaagctggagaagtttacaaactgttacagcctctccaaaaccctcaggtttaaagcgatcccggtgggcaagacccaggagaacatcgacaacaagaggctcctggtggaagacgagaagcgcgccgaagactacaagggcgtgaagaagctgctcgataggtactacctcagctttattaacgacgtgctgcacagcatcaaactcaagaatctcaacaactacatctccctcttccgcaaaaagacccgcaccgagaaggagaacaaggagctggagaacctggagatcaacctccgcaaggaaatcgccaaagcgttcaagggcaatgaagggtacaagagcctcttcaagaaagacatcatcgaaactatcctcccagagtttctcgatgacaaggacgagatcgcgctggtgaactcctttaacgggttcacaaccgcgtttaccggcttctttgataacagggaaaatatgttctccgaggaggccaagtccaccagcatcgccttcaggtgtatcaacgagaacctcacccgctacatttccaatatggacattttcgagaaggtggatgcgatcttcgataagcacgaggtgcaggagatcaaagagaagattctcaattccgattatgacgtcgaggatttcttcgaaggggagttctttaattttgtgctcacacaagagggcattgacgtgtacaacgcgattatcgggggcttcgtcacagagtccggggagaagattaaggggctgaatgagtacatcaatctgtacaatcagaagaccaagcagaaactgccgaaattcaagccgctctacaagcaagtcctgtccgatagggaaagcctctccttctacggcgagggctataccagcgacgaggaggtgctggaagtcttccgcaacacactgaataagaatagcgagattttctcctccatcaagaagctcgagaagctctttaagaactttgacgagtacagctccgccgggattttcgtgaagaacgggccggcgatcagcaccatctccaaggacatctttggcgagtggaacgtcatcagggacaagtggaacgccgagtacgacgacatccacctgaagaagaaggcggtggtgaccgagaagtatgaggacgatcgcaggaagtccttcaaaaaaatcggctccttcagcctcgaacagctccaggagtatgccgatgcggatctgtccgtcgtcgagaagctgaaggaaatcatcattcagaaggtcgacgagatctataaagtgtacgggtccagcgagaagctgttcgacgccgactttgtgctcgagaagtccctcaaaaagaatgacgccgtggtggccattatgaaagacctgctcgactccgtgaagtccttcgaaaattacattaaagcgttctttggggaggggaaggaaactaacagggatgagtccttctatggcgactttgtcctcgcgtacgacatcctgctgaaggtcgaccacatttacgacgcgatccgcaactacgtgacacagaagccgtactcctcaggcggaagtggtggaagtggcggtagtaccaacctcagcgacattatcgagaaggaaaccggcaagcaactcgtgatccaggagagcatactgatgctccccgaggaggtcgaggaggtgattggcaataagcccgagtccgatatactggttcatactgcgtatgacgaaagcacagacgagaacgtcatgctacttaccagcgacgccccggagtacaagccctgggccctagtcatccaagacagcaacggtgagaacaagatcaagatgctttctggcggctcaaaaagaaccgccgacggcagcgaattcgagcccaagaagaagaggaaagtcggaagcggagctactaacttcagcctgctgaagcaggctggagacgtggaggagaaccctggacctatggtgagcaagggcgaggagctgttcaccggggtggtgcccatcctggtcgagctggacggcgacgtaaacggccacaagttcagcgtgtccggcgagggcgagggcgatgccacctacggcaagctgaccctgaagttcatctgcaccaccggcaagctgcccgtgccctggcccaccctcgtgaccaccctgacctatggagtgcagtgcttcagccgctaccccgaccacatgaagcagcacgacttcttcaagtccgccatgcccgaaggctacgtccaggagcgcaccatcttcttcaaggacgacggcaactacaagacccgcgccgaggtgaagttcgagggcgacaccctggtgaaccgcatcgagctgaagggcatcgacttcaaggaggacggcaacatcctggggcacaagctggagtacaactacaacagccacaacgtctatatcatggccgacaagcagaagaacggcatcaaggtgaacttcaagatccgccacaacatcgaggacggcagcgtgcagctcgccgaccactaccagcagaacacccccatcggcgacggccccgtgctgctgcccgacaaccactacctgagcacccagtccgccctgagcaaagaccccaacgagaagcgcgatcacatggtcctgctggagttcgtgaccgccgccgggatcactctcggcatggacgagctgtacaagtctggtggttctcccaagaagaagaggaaagtctaaccggtcatcatcaccatcaccattgagtttaaacccgctgatcagcctcgactgtgccttctagttgccagccatctgttgtttgcccctcccccgtgccttccttgaccctggaaggtgccactcccactgtcctttcctaataaaatgaggaaattgcatcgcattgtctgagtaggtgtcattctattctggggggtggggtggggcaggacagcaagggggaggattgggaagacaatagcaggcatgctggggatgcggtgggctctatggcttctgaggcgaaaagaaccagctggggctcgataccgtcgacctctagctagagcttggcgtaatcatggtcatagctgtttcctgtgtgaaattgttatccgctcacaattccacacaacatacgagccggaagcataaagtgtaaagcctagggtgcctaatgagtgagctaactcacattaattgcgttgcgctcactgcccgctttccagtcgggaaacctgtcgtgccagctgcattaatgaatcggccaacgcgcgggaagaggcggtttgcgtattgggcgctcttccgcttcctcgctcactgactcgctgcgctcggtcgttcggctgcggcgagcggtatcagctcactcaaaggcggtaatacggttatccacagaatcaggggataacgcaggaaagaacatgtgagcaaaaggccagcaaaaggccaggaaccgtaaaaaggccgcgttgctggcgtttttccataggctccgcccccctgacgagcatcacaaaaatcgacgctcaagtcagaggtggcgaaacccgacaggactataaagataccaggcgtttccccctggaagctccctcgtgcgctctcctgttccgaccctgccgcttaccggatacctgtccgcctttctcccttcgggaagcgtggcgctttctcatagctcacgctgtaggtatctcagttcggtgtaggtcgttcgctccaagctgggctgtgtgcacgaaccccccgttcagcccgaccgctgcgccttatccggtaactatcgtcttgagtccaacccggtaagacacgacttatcgccactggcagcagccactggtaacaggattagcagagcgaggtatgtaggcggtgctacagagttcttgaagtggtggcctaactacggctacactagaagaacagtatttggtatctgcgctctgctgaagccagttaccttcggaaaaagagttggtagctcttgatccggcaaacaaaccaccgctggtagcggtggtttttttgtttgcaagcagcagattacgcgcagaaaaaaaggatctcaagaagatcctttgatcttttctacggggtctgacactcagtggaacgaaaactcacgttaagggattttggtcatgagattatcaaaaaggatcttcacctagatccttttaaattaaaaatgaagttttaaatcaatctaaagtatatatgagtaaacttggtctgacagttaccaatgcttaatcagtgaggcacctatctcagcgatctgtctatttcgttcatccatagttgcctgactccccgtcgtgtagataactacgatacgggagggcttaccatctggccccagtgctgcaatgataccgcgagacccacgctcaccggctccagatttatcagcaataaaccagccagccggaagggccgagcgcagaagtggtcctgcaactttatccgcctccatccagtctattaattgttgccgggaagctagagtaagtagttcgccagttaatagtttgcgcaacgttgttgccattgctacaggcatcgtggtgtcacgctcgtcgtttggtatggcttcattcagctccggttcccaacgatcaaggcgagttacatgatcccccatgttgtgcaaaaaagcggttagctccttcggtcctccgatcgttgtcagaagtaagttggccgcagtgttatcactcatggttatggcagcactgcataattctcttactgtcatgccatccgtaagatgcttttctgtgactggtgagtactcaaccaagtcattctgagaatagtgtatgcggcgaccgagttgctcttgcccggcgtcaatacgggataataccgcgccacatagcagaactttaaaagtgctcatcattggaaaacgttcttcggggcgaaaactctcaaggatcttaccgctgttgagatccagttcgatgtaacccactcgtgcacccaactgatcttcagcatcttttactttcaccagcgtttctgggtgagcaaaaacaggaaggcaaaatgccgcaaaaaagggaataagggcgacacggaaatgttgaatactcatactcttcctttttcaatattattgaagcatttatcagggttattgtctcatgagcggatacatatttgaatgtatttagaaaaataaacaaataggggttccgcgcacatttccccgaaaagtgccacctgacgtcgacggatcgggagatcgatctcccgatcccctagggtcgactctcagtacaatctgctctgatgccgcatagttaagccagtatctgctccctgcttgtgtgttggaggtcgctgagtagtgcgcgagcaaaatttaagctacaacaaggcaaggcttgaccgacaattgcatgaagaatctgcttagggttaggcgttttgcgctgcttcgcgatgtacgggcc

SEQ ID NO: 700 - DNA, 9085 bp, synthetic construct
  source 1..9085: mol_type = other DNA
agatatacgcgttgacattgattattgactagttattaatagtaatcaattacggggtcattagttcatagcccatatatggagttccgcgttacataacttacggtaaatggcccgcctggctgaccgcccaacgacccccgcccattgacgtcaataatgacgtatgttcccatagtaacgccaatagggactttccattgacgtcaatgggtggagtatttacggtaaactgcccacttggcagtacatcaagtgtatcatatgccaagtacgccccctattgacgtcaatgacggtaaatggcccgcctggcattatgcccagtacatgaccttatgggactttcctacttggcagtacatctacgtattagtcatcgctattaccatggtgatgcggttttggcagtacatcaatgggcgtggatagcggtttgactcacggggatttccaagtctccaccccattgacgtcaatgggagtttgttttggcaccaaaatcaacgggactttccaaaatgtcgtaacaactccgccccattgacgcaaatgggcggtaggcgtgtacggtgggaggtctatataagcagagctggtttagtgaaccgtcagatccgctagagatccgcggccgctaatacgactcactatagggagagccgccaccatgaaacggacagccgacggaagcgagttcgagtcaccaaagaagaagcggaaagtcgaggcctcccccgcatcaggacctagacacctgatggatccccatattttcacatctaacttcaacaacggaatcggcagacacaagacctacctgtgctatgaggtggaaaggctggataacggaacctctgtgaagatggaccagcacaggtaagtatcaaggttacaagacaggtttaaggagaccaatagaaactgggcttgtcgagacagagaagactcttgcgtttctgataggcacctattggtcttactgacatccactttgcctttctctccacaggggcttcctgcataaccaggccaagaatctgctgtgcggtttctacgggagacatgcagaactgaggtttctggatctggtgccatccctgcagctggaccccgctcagatctacagagtgacttggttcatctcttggagcccttgcttttcatggggatgtgctggcgaggtgagggccttccttcaggaaaacacacacgtgagactgaggatttttgctgccagaatctacgattatgacccactgtacaaggaagctctgcagatgctgagggatgcaggcgctcaggtgagcattatgacctatgacgaattcaagcactgctgggatacttttgtggaccatcagggttgtccttttcagccatgggatgggctggacgagcattctcaggcactgagcggtagactgagggctatcctgcagaaccaggggaattctggtggttctaaagacaagttcaagctgtacttccagaacccgcaatttatggggggctgggacaaggataaagagacagactaccgcgcgacaattctccgctatggctccaaatactatctggccatcatggacaagaagtacgcgaagtgcctgcagaagatcgacaaagacgacgtcaatggcaactatgaaaagatcaactacaagctgctgccgggcccgaacaagatgctcccgaaggtgttcttcagcaagaagtggatggcctactacaatccaagcgaggatattcagaaaatctataaaaacgggaccttcaagaagggggacatgtttaacctcaacgactgccacaagctcattgatttcttcaaggatagcatttcccgctacccgaaatggtccaatgcgtacgattttaacttctccgagacagaaaagtacaaagacatcgcgggcttttacagggaggtggaggagcaagggtataaagtttcttttgaatccgcgagcaagaaggaagtcgacaagctcgtcgaggagggcaagctctacatgttccaaatttataacaaggacttttccgacaagagccatgggaccccaaacctccacaccatgtacttcaaactgctctttgacgagaacaaccacgggcaaatcaggctgagcggcggcgccgaattattcatgcgcagggcctccctcaagaaggaagagctggtcgtccatccagccaattccccgatcgcgaacaagaacccggacaatccgaaaaagaccaccaccctgtcctacgacgtctacaaggacaaacgcttcagcgaagaccagtacgaattacacatcccaattgcgattaataagtgcccaaagaatatcttcaaaattaatacagaggtcagggtgctgctcaaacacgacgacaatccgtatgtcatcggcattgacaggggcgagcgcaatctgctctatatcgtggtcgtggatgggaagggcaatattgtggagcagtactccctgaacgagattatcaacaacttcaatgggattaggattaagaccgactatcacagcctgctcgacaagaaagaaaaagagaggtttgaggcccgccaaaactggacctccattgagaatatcaaagaattaaaggccggctatatttcccaagtcgtccacaagatctgcgagctggtggagaaatatgacgccgtgattgcgctcgaagacttaaattctgggttcaagaactcccgcgtgaaggtggaaaaacaggtgtatcagaaattcgagaaaatgctgatcgacaaactcaattatatggtggataagaagtccaacccgtgtgccacagggggcgcgctgaagggctatcagatcaccaacaagttcgagagcttcaagagcatgagcacccagaacgggtttattttctacatcccggcgtggctcacctccaagattgacccgagcaccggcttcgtgaacctcctgaagacaaagtatacctccattgccgacagcaagaagtttatctcctccttcgaccgcattatgtatgtgccggaggaggacctcttcgagttcgccctcgactacaaaaacttcagccgcacagatgcggattacatcaagaagtggaagctgtactcctacgggaacaggatccgcatcttcaggaatccaaaaaaaaataacgtctttgactgggaggaagtgtgcctgacatccgcctacaaggaactgttcaataaatacggcatcaattaccagcagggcgacattcgcgccctcctctgtgagcagtccgacaaagcgttttactccagcttcatggccctcatgtccctgatgctccaaatggccaatagcatcacagggcgcaccgacgtcgacttcctcatcagcccggtgaagaactccgacgggatcttttacgactcccgcaactatgaggcgcaagagaatgcgatcctcccgaagaacgccgatgcgaacggggcctataatatcgccaggaaagtgctctgggccatcgggcagttcaaaaaggcggaggatgagaagctcgacaaggtgaaaattgccatttccaacaaggagtggctggagtacgcgcagacctccgtgaagcacggctcctctggcagctccggctctagcggctcctctggcagctccggctccaagctggagaagtttacaaactgttacagcctctccaaaaccctcaggtttaaagcgatcccggtgggcaagacccaggagaacatcgacaacaagaggctcctggtggaagacgagaagcgcgccgaagactacaagggcgtgaagaagctgctcgataggtactacctcagctttattaacgacgtgctgcacagcatcaaactcaagaatctcaacaactacatctccctcttccgcaaaaagacccgcaccgagaaggagaacaaggagctggagaacctggagatcaacctccgcaaggaaatcgccaaagcgttcaagggcaatgaagggtacaagagcctcttcaagaaagacatcatcgaaactatcctcccagagtttctcgatgacaaggacgagatcgcgctggtgaactcctttaacgggttcacaaccgcgtttaccggcttctttgataacagggaaaatatgttctccgaggaggccaagtccaccagcatcgccttcaggtgtatcaacgagaacctcacccgctacatttccaatatggacattttcgagaaggtggatgcgatcttcgataagcacgaggtgcaggagatcaaagagaagattctcaattccgattatgacgtcgaggatttcttcgaaggggagttctttaattttgtgctcacacaagagggcattgacgtgtacaacgcgattatcgggggcttcgtcacagagtccggggagaagattaaggggctgaatgagtacatcaatctgtacaatcagaagaccaagcagaaactgccgaaattcaagccgctctacaagcaagtcctgtccgatagggaaagcctctccttctacggcgagggctataccagcgacgaggaggtgctggaagtcttccgcaacacactgaataagaatagcgagattttctcctccatcaagaagctcgagaagctctttaagaactttgacgagtacagctccgccgggattttcgtgaagaacgggccggcgatcagcaccatctccaaggacatctttggcgagtggaacgtcatcagggacaagtggaacgccgagtacgacgacatccacctgaagaagaaggcggtggtgaccgagaagtatgaggacgatcgcaggaagtccttcaaaaaaatcggctccttcagcctcgaacagctccaggagtatgccgatgcggatctgtccgtcgtcgagaagctgaaggaaatcatcattcagaaggtcgacgagatctataaagtgtacgggtccagcgagaagctgttcgacgccgactttgtgctcgagaagtccctcaaaaagaatgacgccgtggtggccattatgaaagacctgctcgactccgtgaagtccttcgaaaattacattaaagcgttctttggggaggggaaggaaactaacagggatgagtccttctatggcgactttgtcctcgcgtacgacatcctgctgaaggtcgaccacatttacgacgcgatccgcaactacgtgacacagaagccgtactcctcaggcggaagtggtggaagtggcggtagtaccaacctcagcgacattatcgagaaggaaaccggcaagcaactcgtgatccaggagagcatactgatgctccccgaggaggtcgaggaggtgattggcaataagcccgagtccgatatactggttcatactgcgtatgacgaaagcacagacgagaacgtcatgctacttaccagcgacgccccggagtacaagccctgggccctagtcatccaagacagcaacggtgagaacaagatcaagatgctttctggcggctcaaaaagaaccgccgacggcagcgaattcgagcccaagaagaagaggaaagtcggaagcggagctactaacttcagcctgctgaagcaggctggagacgtggaggagaaccctggacctatggtgagcaagggcgaggagctgttcaccggggtggtgcccatcctggtcgagctggacggcgacgtaaacggccacaagttcagcgtgtccggcgagggcgagggcgatgccacctacggcaagctgaccctgaagttcatctgcaccaccggcaagctgcccgtgccctggcccaccctcgtgaccaccctgacctatggagtgcagtgcttcagccgctaccccgaccacatgaagcagcacgacttcttcaagtccgccatgcccgaaggctacgtccaggagcgcaccatcttcttcaaggacgacggcaactacaagacccgcgccgaggtgaagttcgagggcgacaccctggtgaaccgcatcgagctgaagggcatcgacttcaaggaggacggcaacatcctggggcacaagctggagtacaactacaacagccacaacgtctatatcatggccgacaagcagaagaacggcatcaaggtgaacttcaagatccgccacaacatcgaggacggcagcgtgcagctcgccgaccactaccagcagaacacccccatcggcgacggccccgtgctgctgcccgacaaccactacctgagcacccagtccgccctgagcaaagaccccaacgagaagcgcgatcacatggtcctgctggagttcgtgaccgccgccgggatcactctcggcatggacgagctgtacaagtctggtggttctcccaagaagaagaggaaagtctaaccggtcatcatcaccatcaccattgagtttaaacccgctgatcagcctcgactgtgccttctagttgccagccatctgttgtttgcccctcccccgtgccttccttgaccctggaaggtgccactcccactgtcctttcctaataaaatgaggaaattgcatcgcattgtctgagtaggtgtcattctattctggggggtggggtggggcaggacagcaagggggaggattgggaagacaatagcaggcatgctggggatgcggtgggctctatggcttctgaggcgaaaagaaccagctggggctcgataccgtcgacctctagctagagcttggcgtaatcatggtcatagctgtttcctgtgtgaaattgttatccgctcacaattccacacaacatacgagccggaagcataaagtgtaaagcctagggtgcctaatgagtgagctaactcacattaattgcgttgcgctcactgcccgctttccagtcgggaaacctgtcgtgccagctgcattaatgaatcggccaacgcgcgggaagaggcggtttgcgtattgggcgctcttccgcttcctcgctcactgactcgctgcgctcggtcgttcggctgcggcgagcggtatcagctcactcaaaggcggtaatacggttatccacagaatcaggggataacgcaggaaagaacatgtgagcaaaaggccagcaaaaggccaggaaccgtaaaaaggccgcgttgctggcgtttttccataggctccgcccccctgacgagcatcacaaaaatcgacgctcaagtcagaggtggcgaaacccgacaggactataaagataccaggcgtttccccctggaagctccctcgtgcgctctcctgttccgaccctgccgcttaccggatacctgtccgcctttctcccttcgggaagcgtggcgctttctcatagctcacgctgtaggtatctcagttcggtgtaggtcgttcgctccaagctgggctgtgtgcacgaaccccccgttcagcccgaccgctgcgccttatccggtaactatcgtcttgagtccaacccggtaagacacgacttatcgccactggcagcagccactggtaacaggattagcagagcgaggtatgtaggcggtgctacagagttcttgaagtggtggcctaactacggctacactagaagaacagtatttggtatctgcgctctgctgaagccagttaccttcggaaaaagagttggtagctcttgatccggcaaacaaaccaccgctggtagcggtggtttttttgtttgcaagcagcagattacgcgcagaaaaaaaggatctcaagaagatcctttgatcttttctacggggtctgacactcagtggaacgaaaactcacgttaagggattttggtcatgagattatcaaaaaggatcttcacctagatccttttaaattaaaaatgaagttttaaatcaatctaaagtatatatgagtaaacttggtctgacagttaccaatgcttaatcagtgaggcacctatctcagcgatctgtctatttcgttcatccatagttgcctgactccccgtcgtgtagataactacgatacgggagggcttaccatctggccccagtgctgcaatgataccgcgagacccacgctcaccggctccagatttatcagcaataaaccagccagccggaagggccgagcgcagaagtggtcctgcaactttatccgcctccatccagtctattaattgttgccgggaagctagagtaagtagttcgccagttaatagtttgcgcaacgttgttgccattgctacaggcatcgtggtgtcacgctcgtcgtttggtatggcttcattcagctccggttcccaacgatcaaggcgagttacatgatcccccatgttgtgcaaaaaagcggttagctccttcggtcctccgatcgttgtcagaagtaagttggccgcagtgttatcactcatggttatggcagcactgcataattctcttactgtcatgccatccgtaagatgcttttctgtgactggtgagtactcaaccaagtcattctgagaatagtgtatgcggcgaccgagttgctcttgcccggcgtcaatacgggataataccgcgccacatagcagaactttaaaagtgctcatcattggaaaacgttcttcggggcgaaaactctcaaggatcttaccgctgttgagatccagttcgatgtaacccactcgtgcacccaactgatcttcagcatcttttactttcaccagcgtttctgggtgagcaaaaacaggaaggcaaaatgccgcaaaaaagggaataagggcgacacggaaatgttgaatactcatactcttcctttttcaatattattgaagcatttatcagggttattgtctcatgagcggatacatatttgaatgtatttagaaaaataaacaaataggggttccgcgcacatttccccgaaaagtgccacctgacgtcgacggatcgggagatcgatctcccgatcccctagggtcgactctcagtacaatctgctctgatgccgcatagttaagccagtatctgctccctgcttgtgtgttggaggtcgctgagtagtgcgcgagcaaaatttaagctacaacaaggcaaggcttgaccgacaattgcatgaagaatctgcttagggttaggcgttttgcgctgcttcgcgatgtacgggcc

SEQ ID NO: 701 - DNA, 9169 bp, synthetic construct
  source 1..9169: mol_type = other DNA
agatatacgcgttgacattgattattgactagttattaatagtaatcaattacggggtcattagttcatagcccatatatggagttccgcgttacataacttacggtaaatggcccgcctggctgaccgcccaacgacccccgcccattgacgtcaataatgacgtatgttcccatagtaacgccaatagggactttccattgacgtcaatgggtggagtatttacggtaaactgcccacttggcagtacatcaagtgtatcatatgccaagtacgccccctattgacgtcaatgacggtaaatggcccgcctggcattatgcccagtacatgaccttatgggactttcctacttggcagtacatctacgtattagtcatcgctattaccatggtgatgcggttttggcagtacatcaatgggcgtggatagcggtttgactcacggggatttccaagtctccaccccattgacgtcaatgggagtttgttttggcaccaaaatcaacgggactttccaaaatgtcgtaacaactccgccccattgacgcaaatgggcggtaggcgtgtacggtgggaggtctatataagcagagctggtttagtgaaccgtcagatccgctagagatccgcggccgctaatacgactcactatagggagagccgccaccatgaaacggacagccgacggaagcgagttcgagtcaccaaagaagaagcggaaagtcgaggcctcccccgcatcaggacctagacacctgatggatccccatattttcacatctaacttcaacaacggaatcggcagacacaagacctacctgtgctatgaggtggaaaggctggataacggaacctctgtgaagatggaccagcacaggtaagtatcaaggttacaagacaggtttaaggagaccaatagaaactgggcttgtcgagacagagaagactcttgcgtttctgataggcacctattggtcttactgacatccactttgcctttctctccacaggggcttcctgcataaccaggccaagaatctgctgtgcggtttctacgggagacatgcagaactgaggtttctggatctggtgccatccctgcagctggaccccgctcagatctacagagtgacttggttcatctcttggagcccttgcttttcatggggatgtgctggcgaggtgagggccttccttcaggaaaacacacacgtgagactgaggatttttgctgccagaatctacgattatgacccactgtacaaggaagctctgcagatgctgagggatgcaggcgctcaggtgagcattatgacctatgacgaattcaagcactgctgggatacttttgtggaccatcagggttgtccttttcagccatgggatgggctggacgagcattctcaggcactgagcggtagactgagggctatcctgcagaaccaggggaattctggtggttcttctggtggttctagcggcagcgagactcccgggacctcagagtccgccacacccgaaagttctggtggttcttctggtggttctaaagacaagttcaagctgtacttccagaacccgcaatttatggggggctgggacaaggataaagagacagactaccgcgcgacaattctccgctatggctccaaatactatctggccatcatggacaagaagtacgcgaagtgcctgcagaagatcgacaaagacgacgtcaatggcaactatgaaaagatcaactacaagctgctgccgggcccgaacaagatgctcccgaaggtgttcttcagcaagaagtggatggcctactacaatccaagcgaggatattcagaaaatctataaaaacgggaccttcaagaagggggacatgtttaacctcaacgactgccacaagctcattgatttcttcaaggatagcatttcccgctacccgaaatggtccaatgcgtacgattttaacttctccgagacagaaaagtacaaagacatcgcgggcttttacagggaggtggaggagcaagggtataaagtttcttttgaatccgcgagcaagaaggaagtcgacaagctcgtcgaggagggcaagctctacatgttccaaatttataacaaggacttttccgacaagagccatgggaccccaaacctccacaccatgtacttcaaactgctctttgacgagaacaaccacgggcaaatcaggctgagcggcggcgccgaattattcatgcgcagggcctccctcaagaaggaagagctggtcgtccatccagccaattccccgatcgcgaacaagaacccggacaatccgaaaaagaccaccaccctgtcctacgacgtctacaaggacaaacgcttcagcgaagaccagtacgaattacacatcccaattgcgattaataagtgcccaaagaatatcttcaaaattaatacagaggtcagggtgctgctcaaacacgacgacaatccgtatgtcatcggcattgacaggggcgagcgcaatctgctctatatcgtggtcgtggatgggaagggcaatattgtggagcagtactccctgaacgagattatcaacaacttcaatgggattaggattaagaccgactatcacagcctgctcgacaagaaagaaaaagagaggtttgaggcccgccaaaactggacctccattgagaatatcaaagaattaaaggccggctatatttcccaagtcgtccacaagatctgcgagctggtggagaaatatgacgccgtgattgcgctcgaagacttaaattctgggttcaagaactcccgcgtgaaggtggaaaaacaggtgtatcagaaattcgagaaaatgctgatcgacaaactcaattatatggtggataagaagtccaacccgtgtgccacagggggcgcgctgaagggctatcagatcaccaacaagttcgagagcttcaagagcatgagcacccagaacgggtttattttctacatcccggcgtggctcacctccaagattgacccgagcaccggcttcgtgaacctcctgaagacaaagtatacctccattgccgacagcaagaagtttatctcctccttcgaccgcattatgtatgtgccggaggaggacctcttcgagttcgccctcgactacaaaaacttcagccgcacagatgcggattacatcaagaagtggaagctgtactcctacgggaacaggatccgcatcttcaggaatccaaaaaaaaataacgtctttgactgggaggaagtgtgcctgacatccgcctacaaggaactgttcaataaatacggcatcaattaccagcagggcgacattcgcgccctcctctgtgagcagtccgacaaagcgttttactccagcttcatggccctcatgtccctgatgctccaaatggccaatagcatcacagggcgcaccgacgtcgacttcctcatcagcccggtgaagaactccgacgggatcttttacgactcccgcaactatgaggcgcaagagaatgcgatcctcccgaagaacgccgatgcgaacggggcctataatatcgccaggaaagtgctctgggccatcgggcagttcaaaaaggcggaggatgagaagctcgacaaggtgaaaattgccatttccaacaaggagtggctggagtacgcgcagacctccgtgaagcacggctcctctggcagctccggctctagcggctcctctggcagctccggctccaagctggagaagtttacaaactgttacagcctctccaaaaccctcaggtttaaagcgatcccggtgggcaagacccaggagaacatcgacaacaagaggctcctggtggaagacgagaagcgcgccgaagactacaagggcgtgaagaagctgctcgataggtactacctcagctttattaacgacgtgctgcacagcatcaaactcaagaatctcaacaactacatctccctcttccgcaaaaagacccgcaccgagaaggagaacaaggagctggagaacctggagatcaacctccgcaaggaaatcgccaaagcgttcaagggcaatgaagggtacaagagcctcttcaagaaagacatcatcgaaactatcctcccagagtttctcgatgacaaggacgagatcgcgctggtgaactcctttaacgggttcacaaccgcgtttaccggcttctttgataacagggaaaatatgttctccgaggaggccaagtccaccagcatcgccttcaggtgtatcaacgagaacctcacccgctacatttccaatatggacattttcgagaaggtggatgcgatcttcgataagcacgaggtgcaggagatcaaagagaagattctcaattccgattatgacgtcgaggatttcttcgaaggggagttctttaattttgtgctcacacaagagggcattgacgtgtacaacgcgattatcgggggcttcgtcacagagtccggggagaagattaaggggctgaatgagtacatcaatctgtacaatcagaagaccaagcagaaactgccgaaattcaagccgctctacaagcaagtcctgtccgatagggaaagcctctccttctacggcgagggctataccagcgacgaggaggtgctggaagtcttccgcaacacactgaataagaatagcgagattttctcctccatcaagaagctcgagaagctctttaagaactttgacgagtacagctccgccgggattttcgtgaagaacgggccggcgatcagcaccatctccaaggacatctttggcgagtggaacgtcatcagggacaagtggaacgccgagtacgacgacatccacctgaagaagaaggcggtggtgaccgagaagtatgaggacgatcgcaggaagtccttcaaaaaaatcggctccttcagcctcgaacagctccaggagtatgccgatgcggatctgtccgtcgtcgagaagctgaaggaaatcatcattcagaaggtcgacgagatctataaagtgtacgggtccagcgagaagctgttcgacgccgactttgtgctcgagaagtccctcaaaaagaatgacgccgtggtggccattatgaaagacctgctcgactccgtgaagtccttcgaaaattacattaaagcgttctttggggaggggaaggaaactaacagggatgagtccttctatggcgactttgtcctcgcgtacgacatcctgctgaaggtcgaccacatttacgacgcgatccgcaactacgtgacacagaagccgtactcctcaggcggaagtggtggaagtggcggtagtaccaacctcagcgacattatcgagaaggaaaccggcaagcaactcgtgatccaggagagcatactgatgctccccgaggaggtcgaggaggtgattggcaataagcccgagtccgatatactggttcatactgcgtatgacgaaagcacagacgagaacgtcatgctacttaccagcgacgccccggagtacaagccctgggccctagtcatccaagacagcaacggtgagaacaagatcaagatgctttctggcggctcaaaaagaaccgccgacggcagcgaattcgagcccaagaagaagaggaaagtcggaagcggagctactaacttcagcctgctgaagcaggctggagacgtggaggagaaccctggacctatggtgagcaagggcgaggagctgttcaccggggtggtgcccatcctggtcgagctggacggcgacgtaaacggccacaagttcagcgtgtccggcgagggcgagggcgatgccacctacggcaagctgaccctgaagttcatctgcaccaccggcaagctgcccgtgccctggcccaccctcgtgaccaccctgacctatggagtgcagtgcttcagccgctaccccgaccacatgaagcagcacgacttcttcaagtccgccatgcccgaaggctacgtccaggagcgcaccatcttcttcaaggacgacggcaactacaagacccgcgccgaggtgaagttcgagggcgacaccctggtgaaccgcatcgagctgaagggcatcgacttcaaggaggacggcaacatcctggggcacaagctggagtacaactacaacagccacaacgtctatatcatggccgacaagcagaagaacggcatcaaggtgaacttcaagatccgccacaacatcgaggacggcagcgtgcagctcgccgaccactaccagcagaacacccccatcggcgacggccccgtgctgctgcccgacaaccactacctgagcacccagtccgccctgagcaaagaccccaacgagaagcgcgatcacatggtcctgctggagttcgtgaccgccgccgggatcactctcggcatggacgagctgtacaagtctggtggttctcccaagaagaagaggaaagtctaaccggtcatcatcaccatcaccattgagtttaaacccgctgatcagcctcgactgtgccttctagttgccagccatctgttgtttgcccctcccccgtgccttccttgaccctggaaggtgccactcccactgtcctttcctaataaaatgaggaaattgcatcgcattgtctgagtaggtgtcattctattctggggggtggggtggggcaggacagcaagggggaggattgggaagacaatagcaggcatgctggggatgcggtgggctctatggcttctgaggcgaaaagaaccagctggggctcgataccgtcgacctctagctagagcttggcgtaatcatggtcatagctgtttcctgtgtgaaattgttatccgctcacaattccacacaacatacgagccggaagcataaagtgtaaagcctagggtgcctaatgagtgagctaactcacattaattgcgttgcgctcactgcccgctttccagtcgggaaacctgtcgtgccagctgcattaatgaatcggccaacgcgcgggaagaggcggtttgcgtattgggcgctcttccgcttcctcgctcactgactcgctgcgctcggtcgttcggctgcggcgagcggtatcagctcactcaaaggcggtaatacggttatccacagaatcaggggataacgcaggaaagaacatgtgagcaaaaggccagcaaaaggccaggaaccgtaaaaaggccgcgttgctggcgtttttccataggctccgcccccctgacgagcatcacaaaaatcgacgctcaagtcagaggtggcgaaacccgacaggactataaagataccaggcgtttccccctggaagctccctcgtgcgctctcctgttccgaccctgccgcttaccggatacctgtccgcctttctcccttcgggaagcgtggcgctttctcatagctcacgctgtaggtatctcagttcggtgtaggtcgttcgctccaagctgggctgtgtgcacgaaccccccgttcagcccgaccgctgcgccttatccggtaactatcgtcttgagtccaacccggtaagacacgacttatcgccactggcagcagccactggtaacaggattagcagagcgaggtatgtaggcggtgctacagagttcttgaagtggtggcctaactacggctacactagaagaacagtatttggtatctgcgctctgctgaagccagttaccttcggaaaaagagttggtagctcttgatccggcaaacaaaccaccgctggtagcggtggtttttttgtttgcaagcagcagattacgcgcagaaaaaaaggatctcaagaagatcctttgatcttttctacggggtctgacactcagtggaacgaaaactcacgttaagggattttggtcatgagattatcaaaaaggatcttcacctagatccttttaaattaaaaatgaagttttaaatcaatctaaagtatatatgagtaaacttggtctgacagttaccaatgcttaatcagtgaggcacctatctcagcgatctgtctatttcgttcatccatagttgcctgactccccgtcgtgtagataactacgatacgggagggcttaccatctggccccagtgctgcaatgataccgcgagacccacgctcaccggctccagatttatcagcaataaaccagccagccggaagggccgagcgcagaagtggtcctgcaactttatccgcctccatccagtctattaattgttgccgggaagctagagtaagtagttcgccagttaatagtttgcgcaacgttgttgccattgctacaggcatcgtggtgtcacgctcgtcgtttggtatggcttcattcagctccggttcccaacgatcaaggcgagttacatgatcccccatgttgtgcaaaaaagcggttagctccttcggtcctccgatcgttgtcagaagtaagttggccgcagtgttatcactcatggttatggcagcactgcataattctcttactgtcatgccatccgtaagatgcttttctgtgactggtgagtactcaaccaagtcattctgagaatagtgtatgcggcgaccgagttgctcttgcccggcgtcaatacgggataataccgcgccacatagcagaactttaaaagtgctcatcattggaaaacgttcttcggggcgaaaactctcaaggatcttaccgctgttgagatccagttcgatgtaacccactcgtgcacccaactgatcttcagcatcttttactttcaccagcgtttctgggtgagcaaaaacaggaaggcaaaatgccgcaaaaaagggaataagggcgacacggaaatgttgaatactcatactcttcctttttcaatattattgaagcatttatcagggttattgtctcatgagcggatacatatttgaatgtatttagaaaaataaacaaataggggttccgcgcacatttccccgaaaagtgccacctgacgtcgacggatcgggagatcgatctcccgatcccctagggtcgactctcagtacaatctgctctgatgccgcatagttaagccagtatctgctccctgcttgtgtgttggaggtcgctgagtagtgcgcgagcaaaatttaagctacaacaaggcaaggcttgaccgacaattgcatgaagaatctgcttagggttaggcgttttgcgctgcttcgcgatgtacgggcc

SEQ ID NO: 702 - protein, 1243 aa, synthetic construct
RTEKENKELENLEINLRKEIAKAFKGNEGYKSLFKKDIIETILPEFLDDKDEIALVNSFNGFTTAFTGFFDNRENMFSEEAKSTSIAFRCINENLTRYISNMDIFEKVDAIFDKHEVQEIKEKILNSDYDVEDFFEGEFFNFVLTQEGIDVYNAIIGGFVTESGEKIKGLNEYINLYNQKTKQKLPKFKPLYKQVLSDRESLSFYGEGYTSDEEVLEVFRNTLNKNSEIFSSIKKLEKLFKNFDEYSSAGIFVKNGPAISTISKDIFGEWNVIRDKWNAEYDDIHLKKKAVVTEKYEDDRRKSFKKIGSFSLEQLQEYADADLSVVEKLKEIIIQKVDEIYKVYGSSEKLFDADFVLEKSLKKNDAVVAIMKDLLDSVKSFENYIKAFFGEGKETNRDESFYGDFVLAYDILLKVDHIYDAIRNYVTQKPYSKDKFKLYFQNPQFMRGWDKDKETDYRATILRYGSKYYLAIMDKKYAKCLQKIDKDDVNGNYEKINYKLLPGPNKMLPRVFFSKKWMAYYNPSEDIQKIYKNGTFKKGDMFNLNDCHKLIDFFKDSISRYPKWSNAYDFNFSETEKYKDIAGFYREVEEQGYKVSFESASKKEVDKLVEEGKLYMFQIYNKDFSDKSHGTPNLHTMYFKLLFDENNHGQIRLSGGAELFMRRASLKKEELVVHPANSPIANKNPDNPKKTTTLSYDVYKDKRFSEDQYELHIPIAINKCPKNIFKINTEVRVLLKHDDNPYVIGIDRGERNLLYIVVVDGKGNIVEQYSLNEIINNFNGIRIKTDYHSLLDKKEKERFEARQNWTSIENIKELKAGYISQVVHKICELVEKYDAVIALEDLNSGFKNSRVKVEKQVYQKFEKMLIDKLNYMVDKKSNPCATGGALKGYQITNKFESFKSMSTQNGFIFYIPAWLTSKIDPSTGFVNLLKTKYTSIADSKKFISSFDRIMYVPEEDLFEFALDYKNFSRTDADYIKKWKLYSYGNRIRIFRNPKKNNVFDWEEVCLTSAYKELFNKYGINYQQGDIRALLCEQSDKAFYSSFMALMSLMLQMRNSITGRTDVDFLISPVKNSDGIFYDSRNYEAQENAILPKNADANGAYNIARKVLWAIGQFKKAEDEKLDKVKIAISNKEWLEYAQTSVKHGSSGSSGSSGSSGSSGSKLEKFTNCYSLSKTLRFKAIPVGKTQENIDNKRLLVEDEKRAEDYKGVKKLLDRYYLSFINDVLHSIKLKNLNNYISLFRKKT

SEQ ID NO: 703 - protein, 1243 aa, synthetic construct
SDGIFYDSRNYEAQENAILPKNADANGAYNIARKVLWAIGQFKKAEDEKLDKVKIAISNKEWLEYAQTSVKHGSSGSSGSSGSSGSSGSKLEKFTNCYSLSKTLRFKAIPVGKTQENIDNKRLLVEDEKRAEDYKGVKKLLDRYYLSFINDVLHSIKLKNLNNYISLFRKKTRTEKENKELENLEINLRKEIAKAFKGNEGYKSLFKKDIIETILPEFLDDKDEIALVNSFNGFTTAFTGFFDNRENMFSEEAKSTSIAFRCINENLTRYISNMDIFEKVDAIFDKHEVQEIKEKILNSDYDVEDFFEGEFFNFVLTQEGIDVYNAIIGGFVTESGEKIKGLNEYINLYNQKTKQKLPKFKPLYKQVLSDRESLSFYGEGYTSDEEVLEVFRNTLNKNSEIFSSIKKLEKLFKNFDEYSSAGIFVKNGPAISTISKDIFGEWNVIRDKWNAEYDDIHLKKKAVVTEKYEDDRRKSFKKIGSFSLEQLQEYADADLSVVEKLKEIIIQKVDEIYKVYGSSEKLFDADFVLEKSLKKNDAVVAIMKDLLDSVKSFENYIKAFFGEGKETNRDESFYGDFVLAYDILLKVDHIYDAIRNYVTQKPYSKDKFKLYFQNPQFMRGWDKDKETDYRATILRYGSKYYLAIMDKKYAKCLQKIDKDDVNGNYEKINYKLLPGPNKMLPRVFFSKKWMAYYNPSEDIQKIYKNGTFKKGDMFNLNDCHKLIDFFKDSISRYPKWSNAYDFNFSETEKYKDIAGFYREVEEQGYKVSFESASKKEVDKLVEEGKLYMFQIYNKDFSDKSHGTPNLHTMYFKLLFDENNHGQIRLSGGAELFMRRASLKKEELVVHPANSPIANKNPDNPKKTTTLSYDVYKDKRFSEDQYELHIPIAINKCPKNIFKINTEVRVLLKHDDNPYVIGIDRGERNLLYIVVVDGKGNIVEQYSLNEIINNFNGIRIKTDYHSLLDKKEKERFEARQNWTSIENIKELKAGYISQVVHKICELVEKYDAVIALEDLNSGFKNSRVKVEKQVYQKFEKMLIDKLNYMVDKKSNPCATGGALKGYQITNKFESFKSMSTQNGFIFYIPAWLTSKIDPSTGFVNLLKTKYTSIADSKKFISSFDRIMYVPEEDLFEFALDYKNFSRTDADYIKKWKLYSYGNRIRIFRNPKKNNVFDWEEVCLTSAYKELFNKYGINYQQGDIRALLCEQSDKAFYSSFMALMSLMLQMRNSITGRTDVDFLISPVKN

SEQ ID NO: 704 - protein, 1243 aa, synthetic construct
KDKFKLYFQNPQFMRGWDKDKETDYRATILRYGSKYYLAIMDKKYAKCLQKIDKDDVNGNYEKINYKLLPGPNKMLPRVFFSKKWMAYYNPSEDIQKIYKNGTFKKGDMFNLNDCHKLIDFFKDSISRYPKWSNAYDFNFSETEKYKDIAGFYREVEEQGYKVSFESASKKEVDKLVEEGKLYMFQIYNKDFSDKSHGTPNLHTMYFKLLFDENNHGQIRLSGGAELFMRRASLKKEELVVHPANSPIANKNPDNPKKTTTLSYDVYKDKRFSEDQYELHIPIAINKCPKNIFKINTEVRVLLKHDDNPYVIGIDRGERNLLYIVVVDGKGNIVEQYSLNEIINNFNGIRIKTDYHSLLDKKEKERFEARQNWTSIENIKELKAGYISQVVHKICELVEKYDAVIALEDLNSGFKNSRVKVEKQVYQKFEKMLIDKLNYMVDKKSNPCATGGALKGYQITNKFESFKSMSTQNGFIFYIPAWLTSKIDPSTGFVNLLKTKYTSIADSKKFISSFDRIMYVPEEDLFEFALDYKNFSRTDADYIKKWKLYSYGNRIRIFRNPKKNNVFDWEEVCLTSAYKELFNKYGINYQQGDIRALLCEQSDKAFYSSFMALMSLMLQMRNSITGRTDVDFLISPVKNSDGIFYDSRNYEAQENAILPKNADANGAYNIARKVLWAIGQFKKAEDEKLDKVKIAISNKEWLEYAQTSVKHGSSGSSGSSGSSGSSGSKLEKFTNCYSLSKTLRFKAIPVGKTQENIDNKRLLVEDEKRAEDYKGVKKLLDRYYLSFINDVLHSIKLKNLNNYISLFRKKTRTEKENKELENLEINLRKEIAKAFKGNEGYKSLFKKDIIETILPEFLDDKDEIALVNSFNGFTTAFTGFFDNRENMFSEEAKSTSIAFRCINENLTRYISNMDIFEKVDAIFDKHEVQEIKEKILNSDYDVEDFFEGEFFNFVLTQEGIDVYNAIIGGFVTESGEKIKGLNEYINLYNQKTKQKLPKFKPLYKQVLSDRESLSFYGEGYTSDEEVLEVFRNTLNKNSEIFSSIKKLEKLFKNFDEYSSAGIFVKNGPAISTISKDIFGEWNVIRDKWNAEYDDIHLKKKAVVTEKYEDDRRKSFKKIGSFSLEQLQEYADADLSVVEKLKEIIIQKVDEIYKVYGSSEKLFDADFVLEKSLKKNDAVVAIMKDLLDSVKSFENYIKAFFGEGKETNRDESFYGDFVLAYDILLKVDHIYDAIRNYVTQKPYS

SEQ ID NO: 705 - protein, 1227 aa, synthetic construct
SKLEKFTNCYSLSKTLRFKAIPVGKTQENIDNKRLLVEDEKRAEDYKGVKKLLDRYYLSFINDVLHSIKLKNLNNYISLFRKKTRTEKENKELENLEINLRKEIAKAFKGNEGYKSLFKKDIIETILPEFLDDKDEIALVNSFNGFTTAFTGFFDNRENMFSEEAKSTSIAFRCINENLTRYISNMDIFEKVDAIFDKHEVQEIKEKILNSDYDVEDFFEGEFFNFVLTQEGIDVYNAIIGGFVTESGEKIKGLNEYINLYNQKTKQKLPKFKPLYKQVLSDRESLSFYGEGYTSDEEVLEVFRNTLNKNSEIFSSIKKLEKLFKNFDEYSSAGIFVKNGPAISTISKDIFGEWNVIRDKWNAEYDDIHLKKKAVVTEKYEDDRRKSFKKIGSFSLEQLQEYADADLSVVEKLKEIIIQKVDEIYKVYGSSEKLFDADFVLEKSLKKNDAVVAIMKDLLDSVKSFENYIKAFFGEGKETNRDESFYGDFVLAYDILLKVDHIYDAIRNYVTQKPYSKDKFKLYFQNPQFMRGWDKDKETDYRATILRYGSKYYLAIMDKKYAKCLQKIDKDDVNGNYEKINYKLLPGPNKMLPRVFFSKKWMAYYNPSEDIQKIYKNGTFKKGDMFNLNDCHKLIDFFKDSISRYPKWSNAYDFNFSETEKYKDIAGFYREVEEQGYKVSFESASKKEVDKLVEEGKLYMFQIYNKDFSDKSHGTPNLHTMYFKLLFDENNHGQIRLSGGAELFMRRASLKKEELVVHPANSPIANKNPDNPKKTTTLSYDVYKDKRFSEDQYELHIPIAINKCPKNIFKINTEVRVLLKHDDNPYVIGIDRGERNLLYIVVVDGKGNIVEQYSLNEIINNFNGIRIKTDYHSLLDKKEKERFEARQNWTSIENIKELKAGYISQVVHKICELVEKYDAVIALEDLNSGFKNSRVKVEKQVYQKFEKMLIDKLNYMVDKKSNPCATGGALKGYQITNKFESFKSMSTQNGFIFYIPAWLTSKIDPSTGFVNLLKTKYTSIADSKKFISSFDRIMYVPEEDLFEFALDYKNFSRTDADYIKKWKLYSYGNRIRIFRNPKKNNVFDWEEVCLTSAYKELFNKYGINYQQGDIRALLCEQSDKAFYSSFMALMSLMLQMRNSITGRTDVDFLISPVKNSDGIFYDSRNYEAQENAILPKNADANGAYNIARKVLWAIGQFKKAEDEKLDKVKIAISNKEWLEYAQTSVKH

SEQ ID NO: 706 - DNA, 3729 bp, synthetic construct
  source 1..3729: mol_type = other DNA
cgcaccgagaaggagaacaaggagctggagaacctggagatcaacctccgcaaggaaatcgccaaagcgttcaagggcaatgaagggtacaagagcctcttcaagaaagacatcatcgaaactatcctcccagagtttctcgatgacaaggacgagatcgcgctggtgaactcctttaacgggttcacaaccgcgtttaccggcttctttgataacagggaaaatatgttctccgaggaggccaagtccaccagcatcgccttcaggtgtatcaacgagaacctcacccgctacatttccaatatggacattttcgagaaggtggatgcgatcttcgataagcacgaggtgcaggagatcaaagagaagattctcaattccgattatgacgtcgaggatttcttcgaaggggagttctttaattttgtgctcacacaagagggcattgacgtgtacaacgcgattatcgggggcttcgtcacagagtccggggagaagattaaggggctgaatgagtacatcaatctgtacaatcagaagaccaagcagaaactgccgaaattcaagccgctctacaagcaagtcctgtccgatagggaaagcctctccttctacggcgagggctataccagcgacgaggaggtgctggaagtcttccgcaacacactgaataagaatagcgagattttctcctccatcaagaagctcgagaagctctttaagaactttgacgagtacagctccgccgggattttcgtgaagaacgggccggcgatcagcaccatctccaaggacatctttggcgagtggaacgtcatcagggacaagtggaacgccgagtacgacgacatccacctgaagaagaaggcggtggtgaccgagaagtatgaggacgatcgcaggaagtccttcaaaaaaatcggctccttcagcctcgaacagctccaggagtatgccgatgcggatctgtccgtcgtcgagaagctgaaggaaatcatcattcagaaggtcgacgagatctataaagtgtacgggtccagcgagaagctgttcgacgccgactttgtgctcgagaagtccctcaaaaagaatgacgccgtggtggccattatgaaagacctgctcgactccgtgaagtccttcgaaaattacattaaagcgttctttggggaggggaaggaaactaacagggatgagtccttctatggcgactttgtcctcgcgtacgacatcctgctgaaggtcgaccacatttacgacgcgatccgcaactacgtgacacagaagccgtactccaaagacaagttcaagctgtacttccagaacccgcaatttatgagaggctgggacaaggataaagagacagactaccgcgcgacaattctccgctatggctccaaatactatctggccatcatggacaagaagtacgcgaagtgcctgcagaagatcgacaaagacgacgtcaatggcaactatgaaaagatcaactacaagctgctgccgggcccgaacaagatgctcccgagggtgttcttcagcaagaagtggatggcctactacaatccaagcgaggatattcagaaaatctataaaaacgggaccttcaagaagggggacatgtttaacctcaacgactgccacaagctcattgatttcttcaaggatagcatttcccgctacccgaaatggtccaatgcgtacgattttaacttctccgagacagaaaagtacaaagacatcgcgggcttttacagggaggtggaggagcaagggtataaagtttcttttgaatccgcgagcaagaaggaagtcgacaagctcgtcgaggagggcaagctctacatgttccaaatttataacaaggacttttccgacaagagccatgggaccccaaacctccacaccatgtacttcaaactgctctttgacgagaacaaccacgggcaaatcaggctgagcggcggcgccgaattattcatgcgcagggcctccctcaagaaggaagagctggtcgtccatccagccaattccccgatcgcgaacaagaacccggacaatccgaaaaagaccaccaccctgtcctacgacgtctacaaggacaaacgcttcagcgaagaccagtacgaattacacatcccaattgcgattaataagtgcccaaagaatatcttcaaaattaatacagaggtcagggtgctgctcaaacacgacgacaatccgtatgtcatcggcattgacaggggcgagcgcaatctgctctatatcgtggtcgtggatgggaagggcaatattgtggagcagtactccctgaacgagattatcaacaacttcaatgggattaggattaagaccgactatcacagcctgctcgacaagaaagaaaaagagaggtttgaggcccgccaaaactggacctccattgagaatatcaaagaattaaaggccggctatatttcccaagtcgtccacaagatctgcgagctggtggagaaatatgacgccgtgattgcgctcgaagacttaaattctgggttcaagaactcccgcgtgaaggtggaaaaacaggtgtatcagaaattcgagaaaatgctgatcgacaaactcaattatatggtggataagaagtccaacccgtgtgccacagggggcgcgctgaagggctatcagatcaccaacaagttcgagagcttcaagagcatgagcacccagaacgggtttattttctacatcccggcgtggctcacctccaagattgacccgagcaccggcttcgtgaacctcctgaagacaaagtatacctccattgccgacagcaagaagtttatctcctccttcgaccgcattatgtatgtgccggaggaggacctcttcgagttcgccctcgactacaaaaacttcagccgcacagatgcggattacatcaagaagtggaagctgtactcctacgggaacaggatccgcatcttcaggaatccaaaaaaaaataacgtctttgactgggaggaagtgtgcctgacatccgcctacaaggaactgttcaataaatacggcatcaattaccagcagggcgacattcgcgccctcctctgtgagcagtccgacaaagcgttttactccagcttcatggccctcatgtccctgatgctccaaatgaggaatagcatcacagggcgcaccgacgtcgacttcctcatcagcccggtgaagaactccgacgggatcttttacgactcccgcaactatgaggcgcaagagaatgcgatcctcccgaagaacgccgatgcgaacggggcctataatatcgccaggaaagtgctctgggccatcgggcagttcaaaaaggcggaggatgagaagctcgacaaggtgaaaattgccatttccaacaaggagtggctggagtacgcgcagacctccgtgaagcacggctcctctggcagctccggctctagcggctcctctggcagctccggctccaagctggagaagtttacaaactgttacagcctctccaaaaccctcaggtttaaagcgatcccggtgggcaagacccaggagaacatcgacaacaagaggctcctggtggaagacgagaagcgcgccgaagactacaagggcgtgaagaagctgctcgataggtactacctcagctttattaacgacgtgctgcacagcatcaaactcaagaatctcaacaactacatctccctcttccgcaaaaagacc

SEQ ID NO: 707 - DNA, 3729 bp, synthetic construct
  source 1..3729: mol_type = other DNA
tccgacgggatcttttacgactcccgcaactatgaggcgcaagagaatgcgatcctcccgaagaacgccgatgcgaacggggcctataatatcgccaggaaagtgctctgggccatcgggcagttcaaaaaggcggaggatgagaagctcgacaaggtgaaaattgccatttccaacaaggagtggctggagtacgcgcagacctccgtgaagcacggctcctctggcagctccggctctagcggctcctctggcagctccggctccaagctggagaagtttacaaactgttacagcctctccaaaaccctcaggtttaaagcgatcccggtgggcaagacccaggagaacatcgacaacaagaggctcctggtggaagacgagaagcgcgccgaagactacaagggcgtgaagaagctgctcgataggtactacctcagctttattaacgacgtgctgcacagcatcaaactcaagaatctcaacaactacatctccctcttccgcaaaaagacccgcaccgagaaggagaacaaggagctggagaacctggagatcaacctccgcaaggaaatcgccaaagcgttcaagggcaatgaagggtacaagagcctcttcaagaaagacatcatcgaaactatcctcccagagtttctcgatgacaaggacgagatcgcgctggtgaactcctttaacgggttcacaaccgcgtttaccggcttctttgataacagggaaaatatgttctccgaggaggccaagtccaccagcatcgccttcaggtgtatcaacgagaacctcacccgctacatttccaatatggacattttcgagaaggtggatgcgatcttcgataagcacgaggtgcaggagatcaaagagaagattctcaattccgattatgacgtcgaggatttcttcgaaggggagttctttaattttgtgctcacacaagagggcattgacgtgtacaacgcgattatcgggggcttcgtcacagagtccggggagaagattaaggggctgaatgagtacatcaatctgtacaatcagaagaccaagcagaaactgccgaaattcaagccgctctacaagcaagtcctgtccgatagggaaagcctctccttctacggcgagggctataccagcgacgaggaggtgctggaagtcttccgcaacacactgaataagaatagcgagattttctcctccatcaagaagctcgagaagctctttaagaactttgacgagtacagctccgccgggattttcgtgaagaacgggccggcgatcagcaccatctccaaggacatctttggcgagtggaacgtcatcagggacaagtggaacgccgagtacgacgacatccacctgaagaagaaggcggtggtgaccgagaagtatgaggacgatcgcaggaagtccttcaaaaaaatcggctccttcagcctcgaacagctccaggagtatgccgatgcggatctgtccgtcgtcgagaagctgaaggaaatcatcattcagaaggtcgacgagatctataaagtgtacgggtccagcgagaagctgttcgacgccgactttgtgctcgagaagtccctcaaaaagaatgacgccgtggtggccattatgaaagacctgctcgactccgtgaagtccttcgaaaattacattaaagcgttctttggggaggggaaggaaactaacagggatgagtccttctatggcgactttgtcctcgcgtacgacatcctgctgaaggtcgaccacatttacgacgcgatccgcaactacgtgacacagaagccgtactccaaagacaagttcaagctgtacttccagaacccgcaatttatgagaggctgggacaaggataaagagacagactaccgcgcgacaattctccgctatggctccaaatactatctggccatcatggacaagaagtacgcgaagtgcctgcagaagatcgacaaagacgacgtcaatggcaactatgaaaagatcaactacaagctgctgccgggcccgaacaagatgctcccgagggtgttcttcagcaagaagtggatggcctactacaatccaagcgaggatattcagaaaatctataaaaacgggaccttcaagaagggggacatgtttaacctcaacgactgccacaagctcattgatttcttcaaggatagcatttcccgctacccgaaatggtccaatgcgtacgattttaacttctccgagacagaaaagtacaaagacatcgcgggcttttacagggaggtggaggagcaagggtataaagtttcttttgaatccgcgagcaagaaggaagtcgacaagctcgtcgaggagggcaagctctacatgttccaaatttataacaaggacttttccgacaagagccatgggaccccaaacctccacaccatgtacttcaaactgctctttgacgagaacaaccacgggcaaatcaggctgagcggcggcgccgaattattcatgcgcagggcctccctcaagaaggaagagctggtcgtccatccagccaattccccgatcgcgaacaagaacccggacaatccgaaaaagaccaccaccctgtcctacgacgtctacaaggacaaacgcttcagcgaagaccagtacgaattacacatcccaattgcgattaataagtgcccaaagaatatcttcaaaattaatacagaggtcagggtgctgctcaaacacgacgacaatccgtatgtcatcggcattgacaggggcgagcgcaatctgctctatatcgtggtcgtggatgggaagggcaatattgtggagcagtactccctgaacgagattatcaacaacttcaatgggattaggattaagaccgactatcacagcctgctcgacaagaaagaaaaagagaggtttgaggcccgccaaaactggacctccattgagaatatcaaagaattaaaggccggctatatttcccaagtcgtccacaagatctgcgagctggtggagaaatatgacgccgtgattgcgctcgaagacttaaattctgggttcaagaactcccgcgtgaaggtggaaaaacaggtgtatcagaaattcgagaaaatgctgatcgacaaactcaattatatggtggataagaagtccaacccgtgtgccacagggggcgcgctgaagggctatcagatcaccaacaagttcgagagcttcaagagcatgagcacccagaacgggtttattttctacatcccggcgtggctcacctccaagattgacccgagcaccggcttcgtgaacctcctgaagacaaagtatacctccattgccgacagcaagaagtttatctcctccttcgaccgcattatgtatgtgccggaggaggacctcttcgagttcgccctcgactacaaaaacttcagccgcacagatgcggattacatcaagaagtggaagctgtactcctacgggaacaggatccgcatcttcaggaatccaaaaaaaaataacgtctttgactgggaggaagtgtgcctgacatccgcctacaaggaactgttcaataaatacggcatcaattaccagcagggcgacattcgcgccctcctctgtgagcagtccgacaaagcgttttactccagcttcatggccctcatgtccctgatgctccaaatgaggaatagcatcacagggcgcaccgacgtcgacttcctcatcagcccggtgaagaac

SEQ ID NO: 708 - DNA, 3729 bp, synthetic construct
  source 1..3729: mol_type = other DNA
aaagacaagttcaagctgtacttccagaacccgcaatttatgagaggctgggacaaggataaagagacagactaccgcgcgacaattctccgctatggctccaaatactatctggccatcatggacaagaagtacgcgaagtgcctgcagaagatcgacaaagacgacgtcaatggcaactatgaaaagatcaactacaagctgctgccgggcccgaacaagatgctcccgagggtgttcttcagcaagaagtggatggcctactacaatccaagcgaggatattcagaaaatctataaaaacgggaccttcaagaagggggacatgtttaacctcaacgactgccacaagctcattgatttcttcaaggatagcatttcccgctacccgaaatggtccaatgcgtacgattttaacttctccgagacagaaaagtacaaagacatcgcgggcttttacagggaggtggaggagcaagggtataaagtttcttttgaatccgcgagcaagaaggaagtcgacaagctcgtcgaggagggcaagctctacatgttccaaatttataacaaggacttttccgacaagagccatgggaccccaaacctccacaccatgtacttcaaactgctctttgacgagaacaaccacgggcaaatcaggctgagcggcggcgccgaattattcatgcgcagggcctccctcaagaaggaagagctggtcgtccatccagccaattccccgatcgcgaacaagaacccggacaatccgaaaaagaccaccaccctgtcctacgacgtctacaaggacaaacgcttcagcgaagaccagtacgaattacacatcccaattgcgattaataagtgcccaaagaatatcttcaaaattaatacagaggtcagggtgctgctcaaacacgacgacaatccgtatgtcatcggcattgacaggggcgagcgcaatctgctctatatcgtggtcgtggatgggaagggcaatattgtggagcagtactccctgaacgagattatcaacaacttcaatgggattaggattaagaccgactatcacagcctgctcgacaagaaagaaaaagagaggtttgaggcccgccaaaactggacctccattgagaatatcaaagaattaaaggccggctatatttcccaagtcgtccacaagatctgcgagctggtggagaaatatgacgccgtgattgcgctcgaagacttaaattctgggttcaagaactcccgcgtgaaggtggaaaaacaggtgtatcagaaattcgagaaaatgctgatcgacaaactcaattatatggtggataagaagtccaacccgtgtgccacagggggcgcgctgaagggctatcagatcaccaacaagttcgagagcttcaagagcatgagcacccagaacgggtttattttctacatcccggcgtggctcacctccaagattgacccgagcaccggcttcgtgaacctcctgaagacaaagtatacctccattgccgacagcaagaagtttatctcctccttcgaccgcattatgtatgtgccggaggaggacctcttcgagttcgccctcgactacaaaaacttcagccgcacagatgcggattacatcaagaagtggaagctgtactcctacgggaacaggatccgcatcttcaggaatccaaaaaaaaataacgtctttgactgggaggaagtgtgcctgacatccgcctacaaggaactgttcaataaatacggcatcaattaccagcagggcgacattcgcgccctcctctgtgagcagtccgacaaagcgttttactccagcttcatggccctcatgtccctgatgctccaaatgaggaatagcatcacagggcgcaccgacgtcgacttcctcatcagcccggtgaagaactccgacgggatcttttacgactcccgcaactatgaggcgcaagagaatgcgatcctcccgaagaacgccgatgcgaacggggcctataatatcgccaggaaagtgctctgggccatcgggcagttcaaaaaggcggaggatgagaagctcgacaaggtgaaaattgccatttccaacaaggagtggctggagtacgcgcagacctccgtgaagcacggctcctctggcagctccggctctagcggctcctctggcagctccggctccaagctggagaagtttacaaactgttacagcctctccaaaaccctcaggtttaaagcgatcccggtgggcaagacccaggagaacatcgacaacaagaggctcctggtggaagacgagaagcgcgccgaagactacaagggcgtgaagaagctgctcgataggtactacctcagctttattaacgacgtgctgcacagcatcaaactcaagaatctcaacaactacatctccctcttccgcaaaaagacccgcaccgagaaggagaacaaggagctggagaacctggagatcaacctccgcaaggaaatcgccaaagcgttcaagggcaatgaagggtacaagagcctcttcaagaaagacatcatcgaaactatcctcccagagtttctcgatgacaaggacgagatcgcgctggtgaactcctttaacgggttcacaaccgcgtttaccggcttctttgataacagggaaaatatgttctccgaggaggccaagtccaccagcatcgccttcaggtgtatcaacgagaacctcacccgctacatttccaatatggacattttcgagaaggtggatgcgatcttcgataagcacgaggtgcaggagatcaaagagaagattctcaattccgattatgacgtcgaggatttcttcgaaggggagttctttaattttgtgctcacacaagagggcattgacgtgtacaacgcgattatcgggggcttcgtcacagagtccggggagaagattaaggggctgaatgagtacatcaatctgtacaatcagaagaccaagcagaaactgccgaaattcaagccgctctacaagcaagtcctgtccgatagggaaagcctctccttctacggcgagggctataccagcgacgaggaggtgctggaagtcttccgcaacacactgaataagaatagcgagattttctcctccatcaagaagctcgagaagctctttaagaactttgacgagtacagctccgccgggattttcgtgaagaacgggccggcgatcagcaccatctccaaggacatctttggcgagtggaacgtcatcagggacaagtggaacgccgagtacgacgacatccacctgaagaagaaggcggtggtgaccgagaagtatgaggacgatcgcaggaagtccttcaaaaaaatcggctccttcagcctcgaacagctccaggagtatgccgatgcggatctgtccgtcgtcgagaagctgaaggaaatcatcattcagaaggtcgacgagatctataaagtgtacgggtccagcgagaagctgttcgacgccgactttgtgctcgagaagtccctcaaaaagaatgacgccgtggtggccattatgaaagacctgctcgactccgtgaagtccttcgaaaattacattaaagcgttctttggggaggggaaggaaactaacagggatgagtccttctatggcgactttgtcctcgcgtacgacatcctgctgaaggtcgaccacatttacgacgcgatccgcaactacgtgacacagaagccgtactcc

SEQ ID NO: 709 - DNA, 3681 bp, synthetic construct
  source 1..3681: mol_type = other DNA
tccaagctggagaagtttacaaactgttacagcctctccaaaaccctcaggtttaaagcgatcccggtgggcaagacccaggagaacatcgacaacaagaggctcctggtggaagacgagaagcgcgccgaagactacaagggcgtgaagaagctgctcgataggtactacctcagctttattaacgacgtgctgcacagcatcaaactcaagaatctcaacaactacatctccctcttccgcaaaaagacccgcaccgagaaggagaacaaggagctggagaacctggagatcaacctccgcaaggaaatcgccaaagcgttcaagggcaatgaagggtacaagagcctcttcaagaaagacatcatcgaaactatcctcccagagtttctcgatgacaaggacgagatcgcgctggtgaactcctttaacgggttcacaaccgcgtttaccggcttctttgataacagggaaaatatgttctccgaggaggccaagtccaccagcatcgccttcaggtgtatcaacgagaacctcacccgctacatttccaatatggacattttcgagaaggtggatgcgatcttcgataagcacgaggtgcaggagatcaaagagaagattctcaattccgattatgacgtcgaggatttcttcgaaggggagttctttaattttgtgctcacacaagagggcattgacgtgtacaacgcgattatcgggggcttcgtcacagagtccggggagaagattaaggggctgaatgagtacatcaatctgtacaatcagaagaccaagcagaaactgccgaaattcaagccgctctacaagcaagtcctgtccgatagggaaagcctctccttctacggcgagggctataccagcgacgaggaggtgctggaagtcttccgcaacacactgaataagaatagcgagattttctcctccatcaagaagctcgagaagctctttaagaactttgacgagtacagctccgccgggattttcgtgaagaacgggccggcgatcagcaccatctccaaggacatctttggcgagtggaacgtcatcagggacaagtggaacgccgagtacgacgacatccacctgaagaagaaggcggtggtgaccgagaagtatgaggacgatcgcaggaagtccttcaaaaaaatcggctccttcagcctcgaacagctccaggagtatgccgatgcggatctgtccgtcgtcgagaagctgaaggaaatcatcattcagaaggtcgacgagatctataaagtgtacgggtccagcgagaagctgttcgacgccgactttgtgctcgagaagtccctcaaaaagaatgacgccgtggtggccattatgaaagacctgctcgactccgtgaagtccttcgaaaattacattaaagcgttctttggggaggggaaggaaactaacagggatgagtccttctatggcgactttgtcctcgcgtacgacatcctgctgaaggtcgaccacatttacgacgcgatccgcaactacgtgacacagaagccgtactccaaagacaagttcaagctgtacttccagaacccgcaatttatgaggggctgggacaaggataaagagacagactaccgcgcgacaattctccgctatggctccaaatactatctggccatcatggacaagaagtacgcgaagtgcctgcagaagatcgacaaagacgacgtcaatggcaactatgaaaagatcaactacaagctgctgccgggcccgaacaagatgctcccgagggtgttcttcagcaagaagtggatggcctactacaatccaagcgaggatattcagaaaatctataaaaacgggaccttcaagaagggggacatgtttaacctcaacgactgccacaagctcattgatttcttcaaggatagcatttcccgctacccgaaatggtccaatgcgtacgattttaacttctccgagacagaaaagtacaaagacatcgcgggcttttacagggaggtggaggagcaagggtataaagtttcttttgaatccgcgagcaagaaggaagtcgacaagctcgtcgaggagggcaagctctacatgttccaaatttataacaaggacttttccgacaagagccatgggaccccaaacctccacaccatgtacttcaaactgctctttgacgagaacaaccacgggcaaatcaggctgagcggcggcgccgaattattcatgcgcagggcctccctcaagaaggaagagctggtcgtccatccagccaattccccgatcgcgaacaagaacccggacaatccgaaaaagaccaccaccctgtcctacgacgtctacaaggacaaacgcttcagcgaagaccagtacgaattacacatcccaattgcgattaataagtgcccaaagaatatcttcaaaattaatacagaggtcagggtgctgctcaaacacgacgacaatccgtatgtcatcggcattgacaggggcgagcgcaatctgctctatatcgtggtcgtggatgggaagggcaatattgtggagcagtactccctgaacgagattatcaacaacttcaatgggattaggattaagaccgactatcacagcctgctcgacaagaaagaaaaagagaggtttgaggcccgccaaaactggacctccattgagaatatcaaagaattaaaggccggctatatttcccaagtcgtccacaagatctgcgagctggtggagaaatatgacgccgtgattgcgctcgaagacttaaattctgggttcaagaactcccgcgtgaaggtggaaaaacaggtgtatcagaaattcgagaaaatgctgatcgacaaactcaattatatggtggataagaagtccaacccgtgtgccacagggggcgcgctgaagggctatcagatcaccaacaagttcgagagcttcaagagcatgagcacccagaacgggtttattttctacatcccggcgtggctcacctccaagattgacccgagcaccggcttcgtgaacctcctgaagacaaagtatacctccattgccgacagcaagaagtttatctcctccttcgaccgcattatgtatgtgccggaggaggacctcttcgagttcgccctcgactacaaaaacttcagccgcacagatgcggattacatcaagaagtggaagctgtactcctacgggaacaggatccgcatcttcaggaatccaaaaaaaaataacgtctttgactgggaggaagtgtgcctgacatccgcctacaaggaactgttcaataaatacggcatcaattaccagcagggcgacattcgcgccctcctctgtgagcagtccgacaaagcgttttactccagcttcatggccctcatgtccctgatgctccaaatgaggaatagcatcacagggcgcaccgacgtcgacttcctcatcagcccggtgaagaactccgacgggatcttttacgactcccgcaactatgaggcgcaagagaatgcgatcctcccgaagaacgccgatgcgaacggggcctataatatcgccaggaaagtgctctgggccatcgggcagttcaaaaaggcggaggatgagaagctcgacaaggtgaaaattgccatttccaacaaggagtggctggagtacgcgcagacctccgtgaagcac

SEQ ID NO: 710 - DNA, 8067 bp, synthetic construct
  source 1..8067: mol_type = other DNA
gacattgattattgactagttattaatagtaatcaattacggggtcattagttcatagcccatatatggagttccgcgttacataacttacggtaaatggcccgcctggctgaccgcccaacgacccccgcccattgacgtcaataatgacgtatgttcccatagtaacgccaatagggactttccattgacgtcaatgggtggagtatttacggtaaactgcccacttggcagtacatcaagtgtatcatatgccaagtacgccccctattgacgtcaatgacggtaaatggcccgcctggcattatgcccagtacatgaccttatgggactttcctacttggcagtacatctacgtattagtcatcgctattaccatggtgatgcggttttggcagtacatcaatgggcgtggatagcggtttgactcacggggatttccaagtctccaccccattgacgtcaatgggagtttgttttggcaccaaaatcaacgggactttccaaaatgtcgtaacaactccgccccattgacgcaaatgggcggtaggcgtgtacggtgggaggtctatataagcagagctggtttagtgaaccgtcagatccgctagagatccgcggccgctaatacgactcactatagggagagccgccaccatgaaacggacagccgacggaagcgagttcgagtcaccaaagaagaagcggaaagtccgcaccgagaaggagaacaaggagctggagaacctggagatcaacctccgcaaggaaatcgccaaagcgttcaagggcaatgaagggtacaagagcctcttcaagaaagacatcatcgaaactatcctcccagagtttctcgatgacaaggacgagatcgcgctggtgaactcctttaacgggttcacaaccgcgtttaccggcttctttgataacagggaaaatatgttctccgaggaggccaagtccaccagcatcgccttcaggtgtatcaacgagaacctcacccgctacatttccaatatggacattttcgagaaggtggatgcgatcttcgataagcacgaggtgcaggagatcaaagagaagattctcaattccgattatgacgtcgaggatttcttcgaaggggagttctttaattttgtgctcacacaagagggcattgacgtgtacaacgcgattatcgggggcttcgtcacagagtccggggagaagattaaggggctgaatgagtacatcaatctgtacaatcagaagaccaagcagaaactgccgaaattcaagccgctctacaagcaagtcctgtccgatagggaaagcctctccttctacggcgagggctataccagcgacgaggaggtgctggaagtcttccgcaacacactgaataagaatagcgagattttctcctccatcaagaagctcgagaagctctttaagaactttgacgagtacagctccgccgggattttcgtgaagaacgggccggcgatcagcaccatctccaaggacatctttggcgagtggaacgtcatcagggacaagtggaacgccgagtacgacgacatccacctgaagaagaaggcggtggtgaccgagaagtatgaggacgatcgcaggaagtccttcaaaaaaatcggctccttcagcctcgaacagctccaggagtatgccgatgcggatctgtccgtcgtcgagaagctgaaggaaatcatcattcagaaggtcgacgagatctataaagtgtacgggtccagcgagaagctgttcgacgccgactttgtgctcgagaagtccctcaaaaagaatgacgccgtggtggccattatgaaagacctgctcgactccgtgaagtccttcgaaaattacattaaagcgttctttggggaggggaaggaaactaacagggatgagtccttctatggcgactttgtcctcgcgtacgacatcctgctgaaggtcgaccacatttacgacgcgatccgcaactacgtgacacagaagccgtactccaaagacaagttcaagctgtacttccagaacccgcaatttatgagaggctgggacaaggataaagagacagactaccgcgcgacaattctccgctatggctccaaatactatctggccatcatggacaagaagtacgcgaagtgcctgcagaagatcgacaaagacgacgtcaatggcaactatgaaaagatcaactacaagctgctgccgggcccgaacaagatgctcccgagggtgttcttcagcaagaagtggatggcctactacaatccaagcgaggatattcagaaaatctataaaaacgggaccttcaagaagggggacatgtttaacctcaacgactgccacaagctcattgatttcttcaaggatagcatttcccgctacccgaaatggtccaatgcgtacgattttaacttctccgagacagaaaagtacaaagacatcgcgggcttttacagggaggtggaggagcaagggtataaagtttcttttgaatccgcgagcaagaaggaagtcgacaagctcgtcgaggagggcaagctctacatgttccaaatttataacaaggacttttccgacaagagccatgggaccccaaacctccacaccatgtacttcaaactgctctttgacgagaacaaccacgggcaaatcaggctgagcggcggcgccgaattattcatgcgcagggcctccctcaagaaggaagagctggtcgtccatccagccaattccccgatcgcgaacaagaacccggacaatccgaaaaagaccaccaccctgtcctacgacgtctacaaggacaaacgcttcagcgaagaccagtacgaattacacatcccaattgcgattaataagtgcccaaagaatatcttcaaaattaatacagaggtcagggtgctgctcaaacacgacgacaatccgtatgtcatcggcattgacaggggcgagcgcaatctgctctatatcgtggtcgtggatgggaagggcaatattgtggagcagtactccctgaacgagattatcaacaacttcaatgggattaggattaagaccgactatcacagcctgctcgacaagaaagaaaaagagaggtttgaggcccgccaaaactggacctccattgagaatatcaaagaattaaaggccggctatatttcccaagtcgtccacaagatctgcgagctggtggagaaatatgacgccgtgattgcgctcgaagacttaaattctgggttcaagaactcccgcgtgaaggtggaaaaacaggtgtatcagaaattcgagaaaatgctgatcgacaaactcaattatatggtggataagaagtccaacccgtgtgccacagggggcgcgctgaagggctatcagatcaccaacaagttcgagagcttcaagagcatgagcacccagaacgggtttattttctacatcccggcgtggctcacctccaagattgacccgagcaccggcttcgtgaacctcctgaagacaaagtatacctccattgccgacagcaagaagtttatctcctccttcgaccgcattatgtatgtgccggaggaggacctcttcgagttcgccctcgactacaaaaacttcagccgcacagatgcggattacatcaagaagtggaagctgtactcctacgggaacaggatccgcatcttcaggaatccaaaaaaaaataacgtctttgactgggaggaagtgtgcctgacatccgcctacaaggaactgttcaataaatacggcatcaattaccagcagggcgacattcgcgccctcctctgtgagcagtccgacaaagcgttttactccagcttcatggccctcatgtccctgatgctccaaatgaggaatagcatcacagggcgcaccgacgtcgacttcctcatcagcccggtgaagaactccgacgggatcttttacgactcccgcaactatgaggcgcaagagaatgcgatcctcccgaagaacgccgatgcgaacggggcctataatatcgccaggaaagtgctctgggccatcgggcagttcaaaaaggcggaggatgagaagctcgacaaggtgaaaattgccatttccaacaaggagtggctggagtacgcgcagacctccgtgaagcacggctcctctggcagctccggctctagcggctcctctggcagctccggctccaagctggagaagtttacaaactgttacagcctctccaaaaccctcaggtttaaagcgatcccggtgggcaagacccaggagaacatcgacaacaagaggctcctggtggaagacgagaagcgcgccgaagactacaagggcgtgaagaagctgctcgataggtactacctcagctttattaacgacgtgctgcacagcatcaaactcaagaatctcaacaactacatctccctcttccgcaaaaagacctctggcggctcaaaaagaaccgccgacggcagcgaattcgagcccaagaagaagaggaaagtcggaagcggagctactaacttcagcctgctgaagcaggctggagacgtggaggagaaccctggacctatggtgagcaagggcgaggagctgttcaccggggtggtgcccatcctggtcgagctggacggcgacgtaaacggccacaagttcagcgtgtccggcgagggcgagggcgatgccacctacggcaagctgaccctgaagttcatctgcaccaccggcaagctgcccgtgccctggcccaccctcgtgaccaccctgacctatggagtgcagtgcttcagccgctaccccgaccacatgaagcagcacgacttcttcaagtccgccatgcccgaaggctacgtccaggagcgcaccatcttcttcaaggacgacggcaactacaagacccgcgccgaggtgaagttcgagggcgacaccctggtgaaccgcatcgagctgaagggcatcgacttcaaggaggacggcaacatcctggggcacaagctggagtacaactacaacagccacaacgtctatatcatggccgacaagcagaagaacggcatcaaggtgaacttcaagatccgccacaacatcgaggacggcagcgtgcagctcgccgaccactaccagcagaacacccccatcggcgacggccccgtgctgctgcccgacaaccactacctgagcacccagtccgccctgagcaaagaccccaacgagaagcgcgatcacatggtcctgctggagttcgtgaccgccgccgggatcactctcggcatggacgagctgtacaagtctggtggttctcccaagaagaagaggaaagtctaaccggtcatcatcaccatcaccattgagtttaaacccgctgatcagcctcgactgtgccttctagttgccagccatctgttgtttgcccctcccccgtgccttccttgaccctggaaggtgccactcccactgtcctttcctaataaaatgaggaaattgcatcgcattgtctgagtaggtgtcattctattctggggggtggggtggggcaggacagcaagggggaggattgggaagacaatagcaggcatgctggggatgcggtgggctctatggcttctgaggcggaaagaaccagctggggctcgataccgtcgacctctagctagagcttggcgtaatcatggtcatagctgtttcctgtgtgaaattgttatccgctcacaattccacacaacatacgagccggaagcataaagtgtaaagcctagggtgcctaatgagtgagctaactcacattaattgcgttgcgctcactgcccgctttccagtcgggaaacctgtcgtgccagctgcattaatgaatcggccaacgcgcggggagaggcggtttgcgtattgggcgctcttccgcttcctcgctcactgactcgctgcgctcggtcgttcggctgcggcgagcggtatcagctcactcaaaggcggtaatacggttatccacagaatcaggggataacgcaggaaagaacatgtgagcaaaaggccagcaaaaggccaggaaccgtaaaaaggccgcgttgctggcgtttttccataggctccgcccccctgacgagcatcacaaaaatcgacgctcaagtcagaggtggcgaaacccgacaggactataaagataccaggcgtttccccctggaagctccctcgtgcgctctcctgttccgaccctgccgcttaccggatacctgtccgcctttctcccttcgggaagcgtggcgctttctcatagctcacgctgtaggtatctcagttcggtgtaggtcgttcgctccaagctgggctgtgtgcacgaaccccccgttcagcccgaccgctgcgccttatccggtaactatcgtcttgagtccaacccggtaagacacgacttatcgccactggcagcagccactggtaacaggattagcagagcgaggtatgtaggcggtgctacagagttcttgaagtggtggcctaactacggctacactagaagaacagtatttggtatctgcgctctgctgaagccagttaccttcggaaaaagagttggtagctcttgatccggcaaacaaaccaccgctggtagcggtggtttttttgtttgcaagcagcagattacgcgcagaaaaaaaggatctcaagaagatcctttgatcttttctacggggtctgacactcagtggaacgaaaactcacgttaagggattttggtcatgagattatcaaaaaggatcttcacctagatccttttaaattaaaaatgaagttttaaatcaatctaaagtatatatgagtaaacttggtctgacagttaccaatgcttaatcagtgaggcacctatctcagcgatctgtctatttcgttcatccatagttgcctgactccccgtcgtgtagataactacgatacgggagggcttaccatctggccccagtgctgcaatgataccgcgagacccacgctcaccggctccagatttatcagcaataaaccagccagccggaagggccgagcgcagaagtggtcctgcaactttatccgcctccatccagtctattaattgttgccgggaagctagagtaagtagttcgccagttaatagtttgcgcaacgttgttgccattgctacaggcatcgtggtgtcacgctcgtcgtttggtatggcttcattcagctccggttcccaacgatcaaggcgagttacatgatcccccatgttgtgcaaaaaagcggttagctccttcggtcctccgatcgttgtcagaagtaagttggccgcagtgttatcactcatggttatggcagcactgcataattctcttactgtcatgccatccgtaagatgcttttctgtgactggtgagtactcaaccaagtcattctgagaatagtgtatgcggcgaccgagttgctcttgcccggcgtcaatacgggataataccgcgccacatagcagaactttaaaagtgctcatcattggaaaacgttcttcggggcgaaaactctcaaggatcttaccgctgttgagatccagttcgatgtaacccactcgtgcacccaactgatcttcagcatcttttactttcaccagcgtttctgggtgagcaaaaacaggaaggcaaaatgccgcaaaaaagggaataagggcgacacggaaatgttgaatactcatactcttcctttttcaatattattgaagcatttatcagggttattgtctcatgagcggatacatatttgaatgtatttagaaaaataaacaaataggggttccgcgcacatttccccgaaaagtgccacctgacgtcgacggatcgggagatcgatctcccgatcccctagggtcgactctcagtacaatctgctctgatgccgcatagttaagccagtatctgctccctgcttgtgtgttggaggtcgctgagtagtgcgcgagcaaaatttaagctacaacaaggcaaggcttgaccgacaattgcatgaagaatctgcttagggttaggcgttttgcgctgcttcgcgatgtacgggccagatatacgcgtt

SEQ ID NO: 711 - DNA, 8067 bp, synthetic construct
  source 1..8067: mol_type = other DNA
gacattgattattgactagttattaatagtaatcaattacggggtcattagttcatagcccatatatggagttccgcgttacataacttacggtaaatggcccgcctggctgaccgcccaacgacccccgcccattgacgtcaataatgacgtatgttcccatagtaacgccaatagggactttccattgacgtcaatgggtggagtatttacggtaaactgcccacttggcagtacatcaagtgtatcatatgccaagtacgccccctattgacgtcaatgacggtaaatggcccgcctggcattatgcccagtacatgaccttatgggactttcctacttggcagtacatctacgtattagtcatcgctattaccatggtgatgcggttttggcagtacatcaatgggcgtggatagcggtttgactcacggggatttccaagtctccaccccattgacgtcaatgggagtttgttttggcaccaaaatcaacgggactttccaaaatgtcgtaacaactccgccccattgacgcaaatgggcggtaggcgtgtacggtgggaggtctatataagcagagctggtttagtgaaccgtcagatccgctagagatccgcggccgctaatacgactcactatagggagagccgccaccatgaaacggacagccgacggaagcgagttcgagtcaccaaagaagaagcggaaagtctccgacgggatcttttacgactcccgcaactatgaggcgcaagagaatgcgatcctcccgaagaacgccgatgcgaacggggcctataatatcgccaggaaagtgctctgggccatcgggcagttcaaaaaggcggaggatgagaagctcgacaaggtgaaaattgccatttccaacaaggagtggctggagtacgcgcagacctccgtgaagcacggctcctctggcagctccggctctagcggctcctctggcagctccggctccaagctggagaagtttacaaactgttacagcctctccaaaaccctcaggtttaaagcgatcccggtgggcaagacccaggagaacatcgacaacaagaggctcctggtggaagacgagaagcgcgccgaagactacaagggcgtgaagaagctgctcgataggtactacctcagctttattaacgacgtgctgcacagcatcaaactcaagaatctcaacaactacatctccctcttccgcaaaaagacccgcaccgagaaggagaacaaggagctggagaacctggagatcaacctccgcaaggaaatcgccaaagcgttcaagggcaatgaagggtacaagagcctcttcaagaaagacatcatcgaaactatcctcccagagtttctcgatgacaaggacgagatcgcgctggtgaactcctttaacgggttcacaaccgcgtttaccggcttctttgataacagggaaaatatgttctccgaggaggccaagtccaccagcatcgccttcaggtgtatcaacgagaacctcacccgctacatttccaatatggacattttcgagaaggtggatgcgatcttcgataagcacgaggtgcaggagatcaaagagaagattctcaattccgattatgacgtcgaggatttcttcgaaggggagttctttaattttgtgctcacacaagagggcattgacgtgtacaacgcgattatcgggggcttcgtcacagagtccggggagaagattaaggggctgaatgagtacatcaatctgtacaatcagaagaccaagcagaaactgccgaaattcaagccgctctacaagcaagtcctgtccgatagggaaagcctctccttctacggcgagggctataccagcgacgaggaggtgctggaagtcttccgcaacacactgaataagaatagcgagattttctcctccatcaagaagctcgagaagctctttaagaactttgacgagtacagctccgccgggattttcgtgaagaacgggccggcgatcagcaccatctccaaggacatctttggcgagtggaacgtcatcagggacaagtggaacgccgagtacgacgacatccacctgaagaagaaggcggtggtgaccgagaagtatgaggacgatcgcaggaagtccttcaaaaaaatcggctccttcagcctcgaacagctccaggagtatgccgatgcggatctgtccgtcgtcgagaagctgaaggaaatcatcattcagaaggtcgacgagatctataaagtgtacgggtccagcgagaagctgttcgacgccgactttgtgctcgagaagtccctcaaaaagaatgacgccgtggtggccattatgaaagacctgctcgactccgtgaagtccttcgaaaattacattaaagcgttctttggggaggggaaggaaactaacagggatgagtccttctatggcgactttgtcctcgcgtacgacatcctgctgaaggtcgaccacatttacgacgcgatccgcaactacgtgacacagaagccgtactccaaagacaagttcaagctgtacttccagaacccgcaatttatgagaggctgggacaaggataaagagacagactaccgcgcgacaattctccgctatggctccaaatactatctggccatcatggacaagaagtacgcgaagtgcctgcagaagatcgacaaagacgacgtcaatggcaactatgaaaagatcaactacaagctgctgccgggcccgaacaagatgctcccgagggtgttcttcagcaagaagtggatggcctactacaatccaagcgaggatattcagaaaatctataaaaacgggaccttcaagaagggggacatgtttaacctcaacgactgccacaagctcattgatttcttcaaggatagcatttcccgctacccgaaatggtccaatgcgtacgattttaacttctccgagacagaaaagtacaaagacatcgcgggcttttacagggaggtggaggagcaagggtataaagtttcttttgaatccgcgagcaagaaggaagtcgacaagctcgtcgaggagggcaagctctacatgttccaaatttataacaaggacttttccgacaagagccatgggaccccaaacctccacaccatgtacttcaaactgctctttgacgagaacaaccacgggcaaatcaggctgagcggcggcgccgaattattcatgcgcagggcctccctcaagaaggaagagctggtcgtccatccagccaattccccgatcgcgaacaagaacccggacaatccgaaaaagaccaccaccctgtcctacgacgtctacaaggacaaacgcttcagcgaagaccagtacgaattacacatcccaattgcgattaataagtgcccaaagaatatcttcaaaattaatacagaggtcagggtgctgctcaaacacgacgacaatccgtatgtcatcggcattgacaggggcgagcgcaatctgctctatatcgtggtcgtggatgggaagggcaatattgtggagcagtactccctgaacgagattatcaacaacttcaatgggattaggattaagaccgactatcacagcctgctcgacaagaaagaaaaagagaggtttgaggcccgccaaaactggacctccattgagaatatcaaagaattaaaggccggctatatttcccaagtcgtccacaagatctgcgagctggtggagaaatatgacgccgtgattgcgctcgaagacttaaattctgggttcaagaactcccgcgtgaaggtggaaaaacaggtgtatcagaaattcgagaaaatgctgatcgacaaactcaattatatggtggataagaagtccaacccgtgtgccacagggggcgcgctgaagggctatcagatcaccaacaagttcgagagcttcaagagcatgagcacccagaacgggtttattttctacatcccggcgtggctcacctccaagattgacccgagcaccggcttcgtgaacctcctgaagacaaagtatacctccattgccgacagcaagaagtttatctcctccttcgaccgcattatgtatgtgccggaggaggacctcttcgagttcgccctcgactacaaaaacttcagccgcacagatgcggattacatcaagaagtggaagctgtactcctacgggaacaggatccgcatcttcaggaatccaaaaaaaaataacgtctttgactgggaggaagtgtgcctgacatccgcctacaaggaactgttcaataaatacggcatcaattaccagcagggcgacattcgcgccctcctctgtgagcagtccgacaaagcgttttactccagcttcatggccctcatgtccctgatgctccaaatgaggaatagcatcacagggcgcaccgacgtcgacttcctcatcagcccggtgaagaactctggcggctcaaaaagaaccgccgacggcagcgaattcgagcccaagaagaagaggaaagtcggaagcggagctactaacttcagcctgctgaagcaggctggagacgtggaggagaaccctggacctatggtgagcaagggcgaggagctgttcaccggggtggtgcccatcctggtcgagctggacggcgacgtaaacggccacaagttcagcgtgtccggcgagggcgagggcgatgccacctacggcaagctgaccctgaagttcatctgcaccaccggcaagctgcccgtgccctggcccaccctcgtgaccaccctgacctatggagtgcagtgcttcagccgctaccccgaccacatgaagcagcacgacttcttcaagtccgccatgcccgaaggctacgtccaggagcgcaccatcttcttcaaggacgacggcaactacaagacccgcgccgaggtgaagttcgagggcgacaccctggtgaaccgcatcgagctgaagggcatcgacttcaaggaggacggcaacatcctggggcacaagctggagtacaactacaacagccacaacgtctatatcatggccgacaagcagaagaacggcatcaaggtgaacttcaagatccgccacaacatcgaggacggcagcgtgcagctcgccgaccactaccagcagaacacccccatcggcgacggccccgtgctgctgcccgacaaccactacctgagcacccagtccgccctgagcaaagaccccaacgagaagcgcgatcacatggtcctgctggagttcgtgaccgccgccgggatcactctcggcatggacgagctgtacaagtctggtggttctcccaagaagaagaggaaagtctaaccggtcatcatcaccatcaccattgagtttaaacccgctgatcagcctcgactgtgccttctagttgccagccatctgttgtttgcccctcccccgtgccttccttgaccctggaaggtgccactcccactgtcctttcctaataaaatgaggaaattgcatcgcattgtctgagtaggtgtcattctattctggggggtggggtggggcaggacagcaagggggaggattgggaagacaatagcaggcatgctggggatgcggtgggctctatggcttctgaggcggaaagaaccagctggggctcgataccgtcgacctctagctagagcttggcgtaatcatggtcatagctgtttcctgtgtgaaattgttatccgctcacaattccacacaacatacgagccggaagcataaagtgtaaagcctagggtgcctaatgagtgagctaactcacattaattgcgttgcgctcactgcccgctttccagtcgggaaacctgtcgtgccagctgcattaatgaatcggccaacgcgcggggagaggcggtttgcgtattgggcgctcttccgcttcctcgctcactgactcgctgcgctcggtcgttcggctgcggcgagcggtatcagctcactcaaaggcggtaatacggttatccacagaatcaggggataacgcaggaaagaacatgtgagcaaaaggccagcaaaaggccaggaaccgtaaaaaggccgcgttgctggcgtttttccataggctccgcccccctgacgagcatcacaaaaatcgacgctcaagtcagaggtggcgaaacccgacaggactataaagataccaggcgtttccccctggaagctccctcgtgcgctctcctgttccgaccctgccgcttaccggatacctgtccgcctttctcccttcgggaagcgtggcgctttctcatagctcacgctgtaggtatctcagttcggtgtaggtcgttcgctccaagctgggctgtgtgcacgaaccccccgttcagcccgaccgctgcgccttatccggtaactatcgtcttgagtccaacccggtaagacacgacttatcgccactggcagcagccactggtaacaggattagcagagcgaggtatgtaggcggtgctacagagttcttgaagtggtggcctaactacggctacactagaagaacagtatttggtatctgcgctctgctgaagccagttaccttcggaaaaagagttggtagctcttgatccggcaaacaaaccaccgctggtagcggtggtttttttgtttgcaagcagcagattacgcgcagaaaaaaaggatctcaagaagatcctttgatcttttctacggggtctgacactcagtggaacgaaaactcacgttaagggattttggtcatgagattatcaaaaaggatcttcacctagatccttttaaattaaaaatgaagttttaaatcaatctaaagtatatatgagtaaacttggtctgacagttaccaatgcttaatcagtgaggcacctatctcagcgatctgtctatttcgttcatccatagttgcctgactccccgtcgtgtagataactacgatacgggagggcttaccatctggccccagtgctgcaatgataccgcgagacccacgctcaccggctccagatttatcagcaataaaccagccagccggaagggccgagcgcagaagtggtcctgcaactttatccgcctccatccagtctattaattgttgccgggaagctagagtaagtagttcgccagttaatagtttgcgcaacgttgttgccattgctacaggcatcgtggtgtcacgctcgtcgtttggtatggcttcattcagctccggttcccaacgatcaaggcgagttacatgatcccccatgttgtgcaaaaaagcggttagctccttcggtcctccgatcgttgtcagaagtaagttggccgcagtgttatcactcatggttatggcagcactgcataattctcttactgtcatgccatccgtaagatgcttttctgtgactggtgagtactcaaccaagtcattctgagaatagtgtatgcggcgaccgagttgctcttgcccggcgtcaatacgggataataccgcgccacatagcagaactttaaaagtgctcatcattggaaaacgttcttcggggcgaaaactctcaaggatcttaccgctgttgagatccagttcgatgtaacccactcgtgcacccaactgatcttcagcatcttttactttcaccagcgtttctgggtgagcaaaaacaggaaggcaaaatgccgcaaaaaagggaataagggcgacacggaaatgttgaatactcatactcttcctttttcaatattattgaagcatttatcagggttattgtctcatgagcggatacatatttgaatgtatttagaaaaataaacaaataggggttccgcgcacatttccccgaaaagtgccacctgacgtcgacggatcgggagatcgatctcccgatcccctagggtcgactctcagtacaatctgctctgatgccgcatagttaagccagtatctgctccctgcttgtgtgttggaggtcgctgagtagtgcgcgagcaaaatttaagctacaacaaggcaaggcttgaccgacaattgcatgaagaatctgcttagggttaggcgttttgcgctgcttcgcgatgtacgggccagatatacgcgtt

SEQ ID NO: 712 - DNA, 8067 bp, synthetic construct
  source 1..8067: mol_type = other DNA
gacattgattattgactagttattaatagtaatcaattacggggtcattagttcatagcccatatatggagttccgcgttacataacttacggtaaatggcccgcctggctgaccgcccaacgacccccgcccattgacgtcaataatgacgtatgttcccatagtaacgccaatagggactttccattgacgtcaatgggtggagtatttacggtaaactgcccacttggcagtacatcaagtgtatcatatgccaagtacgccccctattgacgtcaatgacggtaaatggcccgcctggcattatgcccagtacatgaccttatgggactttcctacttggcagtacatctacgtattagtcatcgctattaccatggtgatgcggttttggcagtacatcaatgggcgtggatagcggtttgactcacggggatttccaagtctccaccccattgacgtcaatgggagtttgttttggcaccaaaatcaacgggactttccaaaatgtcgtaacaactccgccccattgacgcaaatgggcggtaggcgtgtacggtgggaggtctatataagcagagctggtttagtgaaccgtcagatccgctagagatccgcggccgctaatacgactcactatagggagagccgccaccatgaaacggacagccgacggaagcgagttcgagtcaccaaagaagaagcggaaagtcaaagacaagttcaagctgtacttccagaacccgcaatttatgagaggctgggacaaggataaagagacagactaccgcgcgacaattctccgctatggctccaaatactatctggccatcatggacaagaagtacgcgaagtgcctgcagaagatcgacaaagacgacgtcaatggcaactatgaaaagatcaactacaagctgctgccgggcccgaacaagatgctcccgagggtgttcttcagcaagaagtggatggcctactacaatccaagcgaggatattcagaaaatctataaaaacgggaccttcaagaagggggacatgtttaacctcaacgactgccacaagctcattgatttcttcaaggatagcatttcccgctacccgaaatggtccaatgcgtacgattttaacttctccgagacagaaaagtacaaagacatcgcgggcttttacagggaggtggaggagcaagggtataaagtttcttttgaatccgcgagcaagaaggaagtcgacaagctcgtcgaggagggcaagctctacatgttccaaatttataacaaggacttttccgacaagagccatgggaccccaaacctccacaccatgtacttcaaactgctctttgacgagaacaaccacgggcaaatcaggctgagcggcggcgccgaattattcatgcgcagggcctccctcaagaaggaagagctggtcgtccatccagccaattccccgatcgcgaacaagaacccggacaatccgaaaaagaccaccaccctgtcctacgacgtctacaaggacaaacgcttcagcgaagaccagtacgaattacacatcccaattgcgattaataagtgcccaaagaatatcttcaaaattaatacagaggtcagggtgctgctcaaacacgacgacaatccgtatgtcatcggcattgacaggggcgagcgcaatctgctctatatcgtggtcgtggatgggaagggcaatattgtggagcagtactccctgaacgagattatcaacaacttcaatgggattaggattaagaccgactatcacagcctgctcgacaagaaagaaaaagagaggtttgaggcccgccaaaactggacctccattgagaatatcaaagaattaaaggccggctatatttcccaagtcgtccacaagatctgcgagctggtggagaaatatgacgccgtgattgcgctcgaagacttaaattctgggttcaagaactcccgcgtgaaggtggaaaaacaggtgtatcagaaattcgagaaaatgctgatcgacaaactcaattatatggtggataagaagtccaacccgtgtgccacagggggcgcgctgaagggctatcagatcaccaacaagttcgagagcttcaagagcatgagcacccagaacgggtttattttctacatcccggcgtggctcacctccaagattgacccgagcaccggcttcgtgaacctcctgaagacaaagtatacctccattgccgacagcaagaagtttatctcctccttcgaccgcattatgtatgtgccggaggaggacctcttcgagttcgccctcgactacaaaaacttcagccgcacagatgcggattacatcaagaagtggaagctgtactcctacgggaacaggatccgcatcttcaggaatccaaaaaaaaataacgtctttgactgggaggaagtgtgcctgacatccgcctacaaggaactgttcaataaatacggcatcaattaccagcagggcgacattcgcgccctcctctgtgagcagtccgacaaagcgttttactccagcttcatggccctcatgtccctgatgctccaaatgaggaatagcatcacagggcgcaccgacgtcgacttcctcatcagcccggtgaagaactccgacgggatcttttacgactcccgcaactatgaggcgcaagagaatgcgatcctcccgaagaacgccgatgcgaacggggcctataatatcgccaggaaagtgctctgggccatcgggcagttcaaaaaggcggaggatgagaagctcgacaaggtgaaaattgccatttccaacaaggagtggctggagtacgcgcagacctccgtgaagcacggctcctctggcagctccggctctagcggctcctctggcagctccggctccaagctggagaagtttacaaactgttacagcctctccaaaaccctcaggtttaaagcgatcccggtgggcaagacccaggagaacatcgacaacaagaggctcctggtggaagacgagaagcgcgccgaagactacaagggcgtgaagaagctgctcgataggtactacctcagctttattaacgacgtgctgcacagcatcaaactcaagaatctcaacaactacatctccctcttccgcaaaaagacccgcaccgagaaggagaacaaggagctggagaacctggagatcaacctccgcaaggaaatcgccaaagcgttcaagggcaatgaagggtacaagagcctcttcaagaaagacatcatcgaaactatcctcccagagtttctcgatgacaaggacgagatcgcgctggtgaactcctttaacgggttcacaaccgcgtttaccggcttctttgataacagggaaaatatgttctccgaggaggccaagtccaccagcatcgccttcaggtgtatcaacgagaacctcacccgctacatttccaatatggacattttcgagaaggtggatgcgatcttcgataagcacgaggtgcaggagatcaaagagaagattctcaattccgattatgacgtcgaggatttcttcgaaggggagttctttaattttgtgctcacacaagagggcattgacgtgtacaacgcgattatcgggggcttcgtcacagagtccggggagaagattaaggggctgaatgagtacatcaatctgtacaatcagaagaccaagcagaaactgccgaaattcaagccgctctacaagcaagtcctgtccgatagggaaagcctctccttctacggcgagggctataccagcgacgaggaggtgctggaagtcttccgcaacacactgaataagaatagcgagattttctcctccatcaagaagctcgagaagctctttaagaactttgacgagtacagctccgccgggattttcgtgaagaacgggccggcgatcagcaccatctccaaggacatctttggcgagtggaacgtcatcagggacaagtggaacgccgagtacgacgacatccacctgaagaagaaggcggtggtgaccgagaagtatgaggacgatcgcaggaagtccttcaaaaaaatcggctccttcagcctcgaacagctccaggagtatgccgatgcggatctgtccgtcgtcgagaagctgaaggaaatcatcattcagaaggtcgacgagatctataaagtgtacgggtccagcgagaagctgttcgacgccgactttgtgctcgagaagtccctcaaaaagaatgacgccgtggtggccattatgaaagacctgctcgactccgtgaagtccttcgaaaattacattaaagcgttctttggggaggggaaggaaactaacagggatgagtccttctatggcgactttgtcctcgcgtacgacatcctgctgaaggtcgaccacatttacgacgcgatccgcaactacgtgacacagaagccgtactcctctggcggctcaaaaagaaccgccgacggcagcgaattcgagcccaagaagaagaggaaagtcggaagcggagctactaacttcagcctgctgaagcaggctggagacgtggaggagaaccctggacctatggtgagcaagggcgaggagctgttcaccggggtggtgcccatcctggtcgagctggacggcgacgtaaacggccacaagttcagcgtgtccggcgagggcgagggcgatgccacctacggcaagctgaccctgaagttcatctgcaccaccggcaagctgcccgtgccctggcccaccctcgtgaccaccctgacctatggagtgcagtgcttcagccgctaccccgaccacatgaagcagcacgacttcttcaagtccgccatgcccgaaggctacgtccaggagcgcaccatcttcttcaaggacgacggcaactacaagacccgcgccgaggtgaagttcgagggcgacaccctggtgaaccgcatcgagctgaagggcatcgacttcaaggaggacggcaacatcctggggcacaagctggagtacaactacaacagccacaacgtctatatcatggccgacaagcagaagaacggcatcaaggtgaacttcaagatccgccacaacatcgaggacggcagcgtgcagctcgccgaccactaccagcagaacacccccatcggcgacggccccgtgctgctgcccgacaaccactacctgagcacccagtccgccctgagcaaagaccccaacgagaagcgcgatcacatggtcctgctggagttcgtgaccgccgccgggatcactctcggcatggacgagctgtacaagtctggtggttctcccaagaagaagaggaaagtctaaccggtcatcatcaccatcaccattgagtttaaacccgctgatcagcctcgactgtgccttctagttgccagccatctgttgtttgcccctcccccgtgccttccttgaccctggaaggtgccactcccactgtcctttcctaataaaatgaggaaattgcatcgcattgtctgagtaggtgtcattctattctggggggtggggtggggcaggacagcaagggggaggattgggaagacaatagcaggcatgctggggatgcggtgggctctatggcttctgaggcggaaagaaccagctggggctcgataccgtcgacctctagctagagcttggcgtaatcatggtcatagctgtttcctgtgtgaaattgttatccgctcacaattccacacaacatacgagccggaagcataaagtgtaaagcctagggtgcctaatgagtgagctaactcacattaattgcgttgcgctcactgcccgctttccagtcgggaaacctgtcgtgccagctgcattaatgaatcggccaacgcgcggggagaggcggtttgcgtattgggcgctcttccgcttcctcgctcactgactcgctgcgctcggtcgttcggctgcggcgagcggtatcagctcactcaaaggcggtaatacggttatccacagaatcaggggataacgcaggaaagaacatgtgagcaaaaggccagcaaaaggccaggaaccgtaaaaaggccgcgttgctggcgtttttccataggctccgcccccctgacgagcatcacaaaaatcgacgctcaagtcagaggtggcgaaacccgacaggactataaagataccaggcgtttccccctggaagctccctcgtgcgctctcctgttccgaccctgccgcttaccggatacctgtccgcctttctcccttcgggaagcgtggcgctttctcatagctcacgctgtaggtatctcagttcggtgtaggtcgttcgctccaagctgggctgtgtgcacgaaccccccgttcagcccgaccgctgcgccttatccggtaactatcgtcttgagtccaacccggtaagacacgacttatcgccactggcagcagccactggtaacaggattagcagagcgaggtatgtaggcggtgctacagagttcttgaagtggtggcctaactacggctacactagaagaacagtatttggtatctgcgctctgctgaagccagttaccttcggaaaaagagttggtagctcttgatccggcaaacaaaccaccgctggtagcggtggtttttttgtttgcaagcagcagattacgcgcagaaaaaaaggatctcaagaagatcctttgatcttttctacggggtctgacactcagtggaacgaaaactcacgttaagggattttggtcatgagattatcaaaaaggatcttcacctagatccttttaaattaaaaatgaagttttaaatcaatctaaagtatatatgagtaaacttggtctgacagttaccaatgcttaatcagtgaggcacctatctcagcgatctgtctatttcgttcatccatagttgcctgactccccgtcgtgtagataactacgatacgggagggcttaccatctggccccagtgctgcaatgataccgcgagacccacgctcaccggctccagatttatcagcaataaaccagccagccggaagggccgagcgcagaagtggtcctgcaactttatccgcctccatccagtctattaattgttgccgggaagctagagtaagtagttcgccagttaatagtttgcgcaacgttgttgccattgctacaggcatcgtggtgtcacgctcgtcgtttggtatggcttcattcagctccggttcccaacgatcaaggcgagttacatgatcccccatgttgtgcaaaaaagcggttagctccttcggtcctccgatcgttgtcagaagtaagttggccgcagtgttatcactcatggttatggcagcactgcataattctcttactgtcatgccatccgtaagatgcttttctgtgactggtgagtactcaaccaagtcattctgagaatagtgtatgcggcgaccgagttgctcttgcccggcgtcaatacgggataataccgcgccacatagcagaactttaaaagtgctcatcattggaaaacgttcttcggggcgaaaactctcaaggatcttaccgctgttgagatccagttcgatgtaacccactcgtgcacccaactgatcttcagcatcttttactttcaccagcgtttctgggtgagcaaaaacaggaaggcaaaatgccgcaaaaaagggaataagggcgacacggaaatgttgaatactcatactcttcctttttcaatattattgaagcatttatcagggttattgtctcatgagcggatacatatttgaatgtatttagaaaaataaacaaataggggttccgcgcacatttccccgaaaagtgccacctgacgtcgacggatcgggagatcgatctcccgatcccctagggtcgactctcagtacaatctgctctgatgccgcatagttaagccagtatctgctccctgcttgtgtgttggaggtcgctgagtagtgcgcgagcaaaatttaagctacaacaaggcaaggcttgaccgacaattgcatgaagaatctgcttagggttaggcgttttgcgctgcttcgcgatgtacgggccagatatacgcgtt

SEQ ID NO: 713 - DNA, 8019 bp, synthetic construct
  source 1..8019: mol_type = other DNA
gacattgattattgactagttattaatagtaatcaattacggggtcattagttcatagcccatatatggagttccgcgttacataacttacggtaaatggcccgcctggctgaccgcccaacgacccccgcccattgacgtcaataatgacgtatgttcccatagtaacgccaatagggactttccattgacgtcaatgggtggagtatttacggtaaactgcccacttggcagtacatcaagtgtatcatatgccaagtacgccccctattgacgtcaatgacggtaaatggcccgcctggcattatgcccagtacatgaccttatgggactttcctacttggcagtacatctacgtattagtcatcgctattaccatggtgatgcggttttggcagtacatcaatgggcgtggatagcggtttgactcacggggatttccaagtctccaccccattgacgtcaatgggagtttgttttggcaccaaaatcaacgggactttccaaaatgtcgtaacaactccgccccattgacgcaaatgggcggtaggcgtgtacggtgggaggtctatataagcagagctggtttagtgaaccgtcagatccgctagagatccgcggccgctaatacgactcactatagggagagccgccaccatgaaacggacagccgacggaagcgagttcgagtcaccaaagaagaagcggaaagtctccaagctggagaagtttacaaactgttacagcctctccaaaaccctcaggtttaaagcgatcccggtgggcaagacccaggagaacatcgacaacaagaggctcctggtggaagacgagaagcgcgccgaagactacaagggcgtgaagaagctgctcgataggtactacctcagctttattaacgacgtgctgcacagcatcaaactcaagaatctcaacaactacatctccctcttccgcaaaaagacccgcaccgagaaggagaacaaggagctggagaacctggagatcaacctccgcaaggaaatcgccaaagcgttcaagggcaatgaagggtacaagagcctcttcaagaaagacatcatcgaaactatcctcccagagtttctcgatgacaaggacgagatcgcgctggtgaactcctttaacgggttcacaaccgcgtttaccggcttctttgataacagggaaaatatgttctccgaggaggccaagtccaccagcatcgccttcaggtgtatcaacgagaacctcacccgctacatttccaatatggacattttcgagaaggtggatgcgatcttcgataagcacgaggtgcaggagatcaaagagaagattctcaattccgattatgacgtcgaggatttcttcgaaggggagttctttaattttgtgctcacacaagagggcattgacgtgtacaacgcgattatcgggggcttcgtcacagagtccggggagaagattaaggggctgaatgagtacatcaatctgtacaatcagaagaccaagcagaaactgccgaaattcaagccgctctacaagcaagtcctgtccgatagggaaagcctctccttctacggcgagggctataccagcgacgaggaggtgctggaagtcttccgcaacacactgaataagaatagcgagattttctcctccatcaagaagctcgagaagctctttaagaactttgacgagtacagctccgccgggattttcgtgaagaacgggccggcgatcagcaccatctccaaggacatctttggcgagtggaacgtcatcagggacaagtggaacgccgagtacgacgacatccacctgaagaagaaggcggtggtgaccgagaagtatgaggacgatcgcaggaagtccttcaaaaaaatcggctccttcagcctcgaacagctccaggagtatgccgatgcggatctgtccgtcgtcgagaagctgaaggaaatcatcattcagaaggtcgacgagatctataaagtgtacgggtccagcgagaagctgttcgacgccgactttgtgctcgagaagtccctcaaaaagaatgacgccgtggtggccattatgaaagacctgctcgactccgtgaagtccttcgaaaattacattaaagcgttctttggggaggggaaggaaactaacagggatgagtccttctatggcgactttgtcctcgcgtacgacatcctgctgaaggtcgaccacatttacgacgcgatccgcaactacgtgacacagaagccgtactccaaagacaagttcaagctgtacttccagaacccgcaatttatgaggggctgggacaaggataaagagacagactaccgcgcgacaattctccgctatggctccaaatactatctggccatcatggacaagaagtacgcgaagtgcctgcagaagatcgacaaagacgacgtcaatggcaactatgaaaagatcaactacaagctgctgccgggcccgaacaagatgctcccgagggtgttcttcagcaagaagtggatggcctactacaatccaagcgaggatattcagaaaatctataaaaacgggaccttcaagaagggggacatgtttaacctcaacgactgccacaagctcattgatttcttcaaggatagcatttcccgctacccgaaatggtccaatgcgtacgattttaacttctccgagacagaaaagtacaaagacatcgcgggcttttacagggaggtggaggagcaagggtataaagtttcttttgaatccgcgagcaagaaggaagtcgacaagctcgtcgaggagggcaagctctacatgttccaaatttataacaaggacttttccgacaagagccatgggaccccaaacctccacaccatgtacttcaaactgctctttgacgagaacaaccacgggcaaatcaggctgagcggcggcgccgaattattcatgcgcagggcctccctcaagaaggaagagctggtcgtccatccagccaattccccgatcgcgaacaagaacccggacaatccgaaaaagaccaccaccctgtcctacgacgtctacaaggacaaacgcttcagcgaagaccagtacgaattacacatcccaattgcgattaataagtgcccaaagaatatcttcaaaattaatacagaggtcagggtgctgctcaaacacgacgacaatccgtatgtcatcggcattgacaggggcgagcgcaatctgctctatatcgtggtcgtggatgggaagggcaatattgtggagcagtactccctgaacgagattatcaacaacttcaatgggattaggattaagaccgactatcacagcctgctcgacaagaaagaaaaagagaggtttgaggcccgccaaaactggacctccattgagaatatcaaagaattaaaggccggctatatttcccaagtcgtccacaagatctgcgagctggtggagaaatatgacgccgtgattgcgctcgaagacttaaattctgggttcaagaactcccgcgtgaaggtggaaaaacaggtgtatcagaaattcgagaaaatgctgatcgacaaactcaattatatggtggataagaagtccaacccgtgtgccacagggggcgcgctgaagggctatcagatcaccaacaagttcgagagcttcaagagcatgagcacccagaacgggtttattttctacatcccggcgtggctcacctccaagattgacccgagcaccggcttcgtgaacctcctgaagacaaagtatacctccattgccgacagcaagaagtttatctcctccttcgaccgcattatgtatgtgccggaggaggacctcttcgagttcgccctcgactacaaaaacttcagccgcacagatgcggattacatcaagaagtggaagctgtactcctacgggaacaggatccgcatcttcaggaatccaaaaaaaaataacgtctttgactgggaggaagtgtgcctgacatccgcctacaaggaactgttcaataaatacggcatcaattaccagcagggcgacattcgcgccctcctctgtgagcagtccgacaaagcgttttactccagcttcatggccctcatgtccctgatgctccaaatgaggaatagcatcacagggcgcaccgacgtcgacttcctcatcagcccggtgaagaactccgacgggatcttttacgactcccgcaactatgaggcgcaagagaatgcgatcctcccgaagaacgccgatgcgaacggggcctataatatcgccaggaaagtgctctgggccatcgggcagttcaaaaaggcggaggatgagaagctcgacaaggtgaaaattgccatttccaacaaggagtggctggagtacgcgcagacctccgtgaagcactctggcggctcaaaaagaaccgccgacggcagcgaattcgagcccaagaagaagaggaaagtcggaagcggagctactaacttcagcctgctgaagcaggctggagacgtggaggagaaccctggacctatggtgagcaagggcgaggagctgttcaccggggtggtgcccatcctggtcgagctggacggcgacgtaaacggccacaagttcagcgtgtccggcgagggcgagggcgatgccacctacggcaagctgaccctgaagttcatctgcaccaccggcaagctgcccgtgccctggcccaccctcgtgaccaccctgacctatggagtgcagtgcttcagccgctaccccgaccacatgaagcagcacgacttcttcaagtccgccatgcccgaaggctacgtccaggagcgcaccatcttcttcaaggacgacggcaactacaagacccgcgccgaggtgaagttcgagggcgacaccctggtgaaccgcatcgagctgaagggcatcgacttcaaggaggacggcaacatcctggggcacaagctggagtacaactacaacagccacaacgtctatatcatggccgacaagcagaagaacggcatcaaggtgaacttcaagatccgccacaacatcgaggacggcagcgtgcagctcgccgaccactaccagcagaacacccccatcggcgacggccccgtgctgctgcccgacaaccactacctgagcacccagtccgccctgagcaaagaccccaacgagaagcgcgatcacatggtcctgctggagttcgtgaccgccgccgggatcactctcggcatggacgagctgtacaagtctggtggttctcccaagaagaagaggaaagtctaaccggtcatcatcaccatcaccattgagtttaaacccgctgatcagcctcgactgtgccttctagttgccagccatctgttgtttgcccctcccccgtgccttccttgaccctggaaggtgccactcccactgtcctttcctaataaaatgaggaaattgcatcgcattgtctgagtaggtgtcattctattctggggggtggggtggggcaggacagcaagggggaggattgggaagacaatagcaggcatgctggggatgcggtgggctctatggcttctgaggcggaaagaaccagctggggctcgataccgtcgacctctagctagagcttggcgtaatcatggtcatagctgtttcctgtgtgaaattgttatccgctcacaattccacacaacatacgagccggaagcataaagtgtaaagcctagggtgcctaatgagtgagctaactcacattaattgcgttgcgctcactgcccgctttccagtcgggaaacctgtcgtgccagctgcattaatgaatcggccaacgcgcggggagaggcggtttgcgtattgggcgctcttccgcttcctcgctcactgactcgctgcgctcggtcgttcggctgcggcgagcggtatcagctcactcaaaggcggtaatacggttatccacagaatcaggggataacgcaggaaagaacatgtgagcaaaaggccagcaaaaggccaggaaccgtaaaaaggccgcgttgctggcgtttttccataggctccgcccccctgacgagcatcacaaaaatcgacgctcaagtcagaggtggcgaaacccgacaggactataaagataccaggcgtttccccctggaagctccctcgtgcgctctcctgttccgaccctgccgcttaccggatacctgtccgcctttctcccttcgggaagcgtggcgctttctcatagctcacgctgtaggtatctcagttcggtgtaggtcgttcgctccaagctgggctgtgtgcacgaaccccccgttcagcccgaccgctgcgccttatccggtaactatcgtcttgagtccaacccggtaagacacgacttatcgccactggcagcagccactggtaacaggattagcagagcgaggtatgtaggcggtgctacagagttcttgaagtggtggcctaactacggctacactagaagaacagtatttggtatctgcgctctgctgaagccagttaccttcggaaaaagagttggtagctcttgatccggcaaacaaaccaccgctggtagcggtggtttttttgtttgcaagcagcagattacgcgcagaaaaaaaggatctcaagaagatcctttgatcttttctacggggtctgacactcagtggaacgaaaactcacgttaagggattttggtcatgagattatcaaaaaggatcttcacctagatccttttaaattaaaaatgaagttttaaatcaatctaaagtatatatgagtaaacttggtctgacagttaccaatgcttaatcagtgaggcacctatctcagcgatctgtctatttcgttcatccatagttgcctgactccccgtcgtgtagataactacgatacgggagggcttaccatctggccccagtgctgcaatgataccgcgagacccacgctcaccggctccagatttatcagcaataaaccagccagccggaagggccgagcgcagaagtggtcctgcaactttatccgcctccatccagtctattaattgttgccgggaagctagagtaagtagttcgccagttaatagtttgcgcaacgttgttgccattgctacaggcatcgtggtgtcacgctcgtcgtttggtatggcttcattcagctccggttcccaacgatcaaggcgagttacatgatcccccatgttgtgcaaaaaagcggttagctccttcggtcctccgatcgttgtcagaagtaagttggccgcagtgttatcactcatggttatggcagcactgcataattctcttactgtcatgccatccgtaagatgcttttctgtgactggtgagtactcaaccaagtcattctgagaatagtgtatgcggcgaccgagttgctcttgcccggcgtcaatacgggataataccgcgccacatagcagaactttaaaagtgctcatcattggaaaacgttcttcggggcgaaaactctcaaggatcttaccgctgttgagatccagttcgatgtaacccactcgtgcacccaactgatcttcagcatcttttactttcaccagcgtttctgggtgagcaaaaacaggaaggcaaaatgccgcaaaaaagggaataagggcgacacggaaatgttgaatactcatactcttcctttttcaatattattgaagcatttatcagggttattgtctcatgagcggatacatatttgaatgtatttagaaaaataaacaaataggggttccgcgcacatttccccgaaaagtgccacctgacgtcgacggatcgggagatcgatctcccgatcccctagggtcgactctcagtacaatctgctctgatgccgcatagttaagccagtatctgctccctgcttgtgtgttggaggtcgctgagtagtgcgcgagcaaaatttaagctacaacaaggcaaggcttgaccgacaattgcatgaagaatctgcttagggttaggcgttttgcgctgcttcgcgatgtacgggccagatatacgcgtt

SEQ ID NO: 714-727 - skipped (14 entries)

SEQ ID NO: 728 - DNA, 15555 bp, synthetic construct
  source 1..15555: mol_type = other DNA
aaggatccctgaaagcgacgttggatgttaacatctacaaattgccttttcttatcgaccatgtacgtaagcgcttacgtttttggtggacccttgaggaaactggtagctgttgtgggcctgtggactcaagatggatcattaatttccaccttcacctacgatggggggcatcgcaccggtgagtaatattgtacggctaagagcgaatttggcctgtagacctcaattgcgagctttctaatttcaaactattcgggcctaacttttggtgtgatgatgctgactggcaggatatataccgttgtaatttgagctcgtgtgaataagtcgctgtgtatgtttgtttgattgtttctgttggagtgcagcccatttcaccggacaagtcggctagattgatttagccctgatgaactgccgaggggaagccatcttgagcgcggaatgggaatggatttcgttgtacaacgacacgacagaacacccacgggaccgagcttcgaagctttaacgcttgagttaagccgcgccgcgaagcggcgtcggcttgaacgaattgttagacatcagaagaactcgtcaagaaggcgatagaaggcgatgcgctgcgaatcgggagcggcgataccgtaaagcacgaggaagcggtcagcccattcgccgccaagctcttcagcaatatcacgggtagccaacgctatgtcctgatagcggtccgccacacccagccggccacagtcgatgaatccagaaaagcggccattttccaccatgatattcggcaagcaggcatcgccatgggtcacgacgagatcctcgccgtcgggcatgcgcgccttgagcctggcgaacagttcggctggcgcgagcccctgatgctcttcgtccagatcatcctgatcgacaagaccggcttccatccgagtacgtgctcgctcgatgcgatgtttcgcttggtggtcgaatgggcaggtagccggatcaagcgtatgcagccgccgcattgcatcagccatgatggatactttctcggcaggagcaaggtgagatgacaggagatcctgccccggcacttcgcccaatagcagccagtcccttcccgcttcagtgacaacgtcgagcacagctgcgcaaggaacgcccgtcgtggccagccacgatagccgcgctgcctcgtcctgcagttcattcagggcaccggacaggtcggtcttgacaaaaagaaccgggcgcccctgcgctgacagccggaacacggcggcatcagagcagccgattgtctgttgtgcccagtcatagccgaatagcctctccacccaagcggccggagaacctgcgtgcaatccatcttgttcaatcatggctttgtttctccttcaatcattgactattgtcacgttattctgaatcgacgagaactcacatcaatctcaacaagcatctctgctcgcgaaattggtgttgtctcattaaaacgtgaccgtcaaagtctattcactaggacccaaatctctccaggtcccgcaagctagcttcgccgcccacgtttctctttcttctcatattcaattgtcaaaaaacagacctcatgaccaaaatcccttaacgtgagttttcgttccactgagcgtcagaccccgtagaaaagatcaaaggatcttcttgagatcctttttttctgcgcgtaatctgctgcttgcaaacaaaaaaaccaccgctaccagcggtggtttgtttgccggatcaagagctaccaactttttttccgaaggtaactggcttcagcagagcgcagataccaaatactgtccttctagtgtagccgtagttaggccaccacttcaagaactctgtagcaccgcctacatacctcgctctgctaatcctgttaccagtggctgctgccagtggcgataagtcgtgtcttaccgggttggactcaagacgatagttaccggataaggcgcagcggtcgggctgaacggggggttcgtgcacacagcccagcttggagcgaacgacctacaccgaactgagatacctacagcgtgagctatgagaaagcgccacgcttcccgaagggagaaaggcggacaggtatccggtaagcggcagggtcggaacaggagagcgcacgagggagcttccagggggaaacgcctggtatctttatagtcctgtcgggtttcgccacctctgacttgagcgtcgatttttgtgatgctcgtcaggggggcggagcctatggaaaaacgccagcaacgcggcctttttacggttcctggccttttgctggccttttgctcacatgttctttcctgcgttatcccctgattctgtggataaccgtattaccgcctttgagtgagctgataccgctcgccgcagccgaacgaccgagcgcagcgagtcagtgagcgaggaagcggaagagcgcctgatgcggtattttctccttacgcatctgtgcggtatttcacaccgcatatggtgcactctcagtacaatctgctctgatgccgcatagttaagccagtatacaggctctccttcacgatcaacgatcggcatggggccttcgtgcttgttgagtaatgttatcgctcccatcagagcacgcttggtactccgggaatcggatggtctgtcgatcatccaaaaaacgctcatgttttcaacctattaggtctgtggtcagctgaccacagaccatcctgctccatactcgctaattctagccaaaccgcaacgtcccctgcccgctagccttcaagagcgccattatcatcgggccaagtgaaaacttcccgagctcgctccgccgtgtcagatctcggagatagcccccgggcgaattgatgaagttcgctcgctccaaaatgcacgccatcgctgctgccgcattctccggtcccattgcctcacacgcgtcttggtaagccgacgggctgacccccagcatagaccgaaccaccaccgcagccgacatgaggtcacgccagctagcaaccgcaccgctcggcccataattgccaatggtcgggcatgctttcaggatcatcccgagggggaacgcttttatcggctcgctccttgcccggtctatttcactcggcttagcgccctgctccttttcagagcgaggttcaagttcattaacggattcgggttttgaattctgtatgtgctgctcgctctgggcagcattggtgctattattttctgaattgtctctaatttccaaccggttgattatctcttcctggagcatccacatctcttcgagaattgactctacatcagcaagcgtcggggcgcgtggaattctacccacaagttccacatagacttcctcgacagcttgccagtcgccctccgctccctcttccatagctgccgtaattagcttccgaacgtcccgtcggcaaatcgtcagactttctttggccatcctgaatgctgctcgatcggccatcacttgctgtgccatcatcgctagctcttcggaccgcgcgagaagcggagacaaatcgaagccaaacgcgcgctcgatctgaccagcgccatccttacgagcgtaacgctttccgttggcgctatccttccggacgatcaagcctgactccacgagcatggcgatgtgcctacgcaaagtcgcgccagccatcccatgcgcccgaagggcaagctgagcattcgacgggaagacgatcagctgtgcctcctgacgcaactccgtttccgggtgaaagctcaatagcgcatcaaggacggcaagactgttggactggattccaagtagttccatggccgcggacgcatctctaaagaccttccacttgtccgctgtcttgccttgtttgatatcggccagcgccgtctggcgccgcacaagcgcaagcgtcattggccgccgcccgaatggcgtcgttacacttcctgtctgcatcatctttcacctttcagcaggcaaaggaaatcagctcaccaaaacggcgctaaaaactcttgacgaggattcgaggaaatgcgattctgttcgcgctagagagacagaagggcttccgcgacggcgacgttgagggggctcttttcttttgcggtttactctccccgtttccgttggttctcagcgtggtacgcttgatacagcgctggcacatgatcgagcacgaaggtcgcaaaatcgggcgtcgccttcctgtcaatcgtgatttccagtttggccttgctctgcgtcacctgtgcaattctggtgccgtctggggtggccatgacctcgggaagtccacgcgcaacccgactgggcttcagactagcgatcaccgccttgaatcgttctgccgatggcagcgcttgaacttcctccgacatagcatatttagccacgtcggccggtgaagaaactttctcaatcagctcggcaagttgttgccaactcggccgtccaacaccaggagcggcaccaatagcatcggtcagttcagaggggagggcgtcgacgagcagaagcatcttggacaaattgctcttgtcgatcgacatcgcggcgatgacaatctctcgagaaaactgcctgttcaggcgatgtgcgaagcgcgccttttcgatgaaggtaagatcttcgcgctcattgttttcctgaccctgtgctacgaccacttgctcgtccgtcagttcgcgaacgaccgctctgaccggaagtccgagttctgaaacggcgcgtagccggcggtggccgaaggcaacctgatatcggcccggctggctcggatgcggtcgcacaaggattgggacttgctgtccttgttcccggatcgaagtaaggagcccgtcaatgtcccctcgcatacgatcctgcacgaaagacggttctattgacgaggcatccaactctatcactgcctgaccttcagcgaggcgccgctcgatctcttcggcacggctaagacgatcgttttgctctcgcagtgcgttaccaatgttcgctgtgagcttcgttgccggatcgcgctccttccttgttacgccgaggagcggcatggagcggttctttgccgtcctattgtcggcgggcgacgtttcaggggcgtcagttgacacgccaaggatgtgcttccggctcatgtgggcctaccccatgcttttttgatcagtgtttcgatctcgtcgttgacggcgttcatcgcctccaaggctcgatcataggtcgagcgcgtgaacaggccacgctccacttcgaatagagtctggtttgtcaggccagcgtccgaaaccgcggtggttttaagcatcggaaaattgaggacattttcgccaaaaatcgaccgcagataacctaccatttggttctgtggtccgtcgctcggttcgaaacgggttatcagatagcgcatccaattaaacttgaacttggcgccagcattctcgatttcacgcaaaaggttcgatgtcattgccagaaactggttcatcgacatcacatccagcatctgcggatggaccgtgacaagaatggacgtcgccgcagtcaatgcggatagcgtgagatacccaagctggggagggcagtcgatgaccacgacgtcatagttatccgcgatatcttcaattacttggctgatgcgaccataaaagagcgtgtcgccctctttgcggttcatcagcgcgcgtggcgtatcgtgttcaaactccatcagctcaaggttaccaggaatcaggtggaggtcgggaatgtaagtccctcggacgactcgttcgattgccacttgctcatcatcataccttatagcgccgtagagcgtttcgttcgggccaacgtccgtttccggttggctcccaaagagtgcagaaaggctcgcttgaggatcgagatcaatggccaagactcgatatccgcgcatagcgaggtactgcgccagatgcgcggcggtggtggtcttacccgacccacctttgaaattcatcacagagataacctgaagctgctcgccgcctcgacgatgtggcaggtagcgccggttcccgcggccgacctgatccatatacttccgaatcacatggatatcttcaattgagaacattcgcctgccacccgggctcatgctaacattcaactctggcatctcagacgcggtctgccgtaaatatgactcgccaacgccgagcagcttggacgcctccgatggcccgaatgttcgaatgcccttctcggaatgcggcgggaaaaccttaagatgatgtgcttgaagttggctcgagagggcatcggcatgacgctccatcaaggccgtcaaccctacaactacaggcgctgcttttaggacagacttcgccatctcaaacccattccttgccagtggcgatatttttcgcgaaactggaaaagttccgccgctggcaattagcgccgattctgctgtttgggcaagagcttttaggttaacagaaggttaacgccctcaggtcgaaaaactccacccaactgttatttgtatttatttccaatgccttagagagattgccatttgaatatgttcatgtattgttttagtgataatcctacaatcgtaacccaaaaagaggtcgccctctgcgcgccgtcgtccaatataggcgaagtcacccttgcgactcaggcggattctaccttgtacacgtgtcgagtggaaaagtcccatgtggatcactccgttgccccgtcgctcaccgtgttggggggaaggtgcacatggctcagttctcaatggaaattatctgcctaaccggctcagttctgcgtagaaaccaacatgcaagctccaccgggtgcaaagcggcagcggcggcaggatatattcaattgtaaatggcttcatgtccgggaaatctacatggatcagcaatgagtatgatggtcaatatggagaaaaagaaagagtaattaccaattttttttcaattcaaaaatgtagatgtccgcagcgttattataaaatgaaagtacattttgataaaacgacaaattacgatccgtcgtatttataggcgaaagcaataaacaaattattctaattcggaaatctttatttcgacgtgtctacattcacgtccaaatgggggcttagatgagaaacttcacgatcgatgcggccctgccggcgcgccactagtcaacaattggccaatctttgttctaaattgctaataaacgaccatttccgtcaattctccttggttgcaacagtctacccgtcaaatgtttactaatttataagtgtgaagtttgaattatgaaagacgaaatcgtattaaaaattcacaagaataaacaactccatagattttcaaaaaaacagtcacgagaaaaaaaccacagtccgtttgtctgctcttctagtttttattatttttctattaatagttttttgttatttcgagaataaaatttgaacgatgtccgaaccacaaaagccgagccgataaatcctaagccgagcctaactttagccgtaaccatcagtcacggctcccgggctaattcatttgaaccgaatcataatcaacggtttagatcaaactcaaaacaatctaacggcaacatagacgcgtcggtgagctaaaaagagtgtgaaagccaggtcaccatagcattgtctctcccagattttttatttgggaaataatagaagaaatagaaaaaaataaaagagtgagaaaaatcgtagagctatatattcgcacatgtactcgtttcgctttccttagtgttagctgctgccgctgttgtttctcctccatttctctatctttctctctcgctgcttctcgaatcttctgtatcatcttcttcttcttcaaggtgagtctctagatccgttcgcttgattttgctgctcgttagtcgttattgttgattctctatgccgatttcgctagatctgtttagcatgcgttgtggttttatgagaaaatctttgttttgggggttgcttgttatgtgattcgatccgtgcttgttggatcgatctgagctaattcttaaggtttatgtgttagatctatggagtttgaggattcttctcgcttctgtcgatctctcgctgttatttttgtttttttcagtgaagtgaagttgtttagttcgaaatgacttcgtgtatgctcgattgatctggttttaatcttcgatctgttaggtgttgatgtttacaagtgaattctagtgttttctcgttgagatctgtgaagtttgaacctagttttctcaataatcaacatatgaagcgatgtttgagtttcaataaacgctgctaatcttcgaaactaagttgtgatctgattcgtgtttacttcatgagcttatccaattcatttcggtttcattttactttttttttagtgaaccatggcgcaagttagcagaatctgcaatggtgtgcagaacccatctcttatctccaatctctcgaaatccagtcaacgcaaatctcccttatcggtttctctgaagacgcagcagcatccacgagcttatccgatttcgtcgtcgtggggattgaagaagagtgggatgacgttaattggctctgagcttcgtcctcttaaggtcatgtcttctgtttccacggcgtgcatgggggaagcggtgatcgccgaagtatcgactcaactatcagaggtagttggcgtcatcgagcgccatctcgaaccgacgttgctggccgtacatttgtacggctccgcagtggatggcggcctgaagccacacagtgatattgatttgctggttacggtgaccgtaaggcttgatgaaacaacgcggcgagctttgatcaacgaccttttggaaacttcggcttcccctggagagagcgagattctccgcgctgtagaagtcaccattgttgtgcacgacgacatcattccgtggcgttatccagctaagcgcgaactgcaatttggagaatggcagcgcaatgacattcttgcaggtatcttcgagccagccacgatcgacattgatctggctatcttgctgacaaaagcaagagaacatagcgttgccttggtaggtccagcggcggaggaactctttgatccggttcctgaacaggatctatttgaggcgctaaatgaaaccttaacgctatggaactcgccgcccgactgggctggcgatgagcgaaatgtagtgcttacgttgtcccgcatttggtacagcgcagtaaccggcaaaatcgcgccgaaggatgtcgctgccgactgggcaatggagcgcctgccggcccagtatcagcccgtcatacttgaagctagacaggcttatcttggacaagaagaagatcgcttggcctcgcgcgcagatcagttggaagaatttgtccactacgtgaaaggcgagatcaccaaggtagtcggcaaataaggatcaattcccgatcgttcaaacatttggcaataaagtttcttaagattgaatcctgttgccggtcttgcgatgattatcatataatttctgttgaattacgttaagcatgtaataattaacatgtaatgcatgacgttatttatgagatgggtttttatgattagagtcccgcaattatacatttaatacgcgatagaaaacaaaatatagcgcgcaaactaggataaattatcgcgcgcggtgtcatctatgttactagatcacgcgtgtatgcaatatcctgcagggtattaattaattatgccctaagacatcctggaccaatatgctgaagattatgctacctacaccaggataggacttgaagcacttaaccttgaagattggttcgaagaaccagaacccgatccacctaaccctgtggaccgccagaggatagaggacatcctggacctactgaacgtcagcaatgacgactgaaagattcccaggacaccggcggaagtggtggacccagtctaggtgcgatgcttagtcgcgcacgatgactatgtcggaaggcatctttgctttcggcaaactttagtaatactttaaggaaagtattgtacaagttaggtgcagagacaataatgcacccagctttagctttgtttatggaattattgtgtcggttgcattattggatgcctgcgtgcaccctaagcaatcaacggagaaacaaagataaaaatcaattactcacatgaaagagtattgatcacgagtcactatggagcgacaatctccagacaggatgtcagcatcttatcttcctttgaagaaagcatcatcaataacgatgtaatggtggggacatccactaagttattgctctgcaaacagctcaaaaagctactggccgacaatcataattgctcggcatgtccaggtggggcctccactagcaataatacaagctttacagcttgcagtgactcatcctccaataatggagaaaaagacgtcagcagtgacgaacaagggtcgaaagacttgcctatataagggcattctcccctcagttgaagatcatcgaaagttggagcaataaactctctcttcaacaaatctatcttttatcttttatcgccgcaatggcgggatctaagaagagaagaattaaacaagatcgcaccgagaaggagaacaaggagctggagaacctggagatcaacctccgcaaggaaatcgccaaagcgttcaagggcaatgaagggtacaagagcctcttcaagaaagacatcatcgaaactatcctcccagagtttctcgatgacaaggacgagatcgcgctggtgaactcctttaacgggttcacaaccgcgtttaccggcttctttgataacagggaaaatatgttctccgaggaggccaagtccaccagcatcgccttcaggtgtatcaacgagaacctcacccgctacatttccaatatggacattttcgagaaggtggatgcgatcttcgataagcacgaggtgcaggagatcaaagagaagattctcaattccgattatgacgtcgaggatttcttcgaaggggagttctttaattttgtgctcacacaagagggcattgacgtgtacaacgcgattatcgggggcttcgtcacagagtccggggagaagattaaggggctgaatgagtacatcaatctgtacaatcagaagaccaagcagaaactgccgaaattcaagccgctctacaagcaagtcctgtccgatagggaaagcctctccttctacggcgagggctataccagcgacgaggaggtgctggaagtcttccgcaacacactgaataagaatagcgagattttctcctccatcaagaagctcgagaagctctttaagaactttgacgagtacagctccgccgggattttcgtgaagaacgggccggcgatcagcaccatctccaaggacatctttggcgagtggaacgtcatcagggacaagtggaacgccgagtacgacgacatccacctgaagaagaaggcggtggtgaccgagaagtatgaggacgatcgcaggaagtccttcaaaaaaatcggctccttcagcctcgaacagctccaggagtatgccgatgcggatctgtccgtcgtcgagaagctgaaggaaatcatcattcagaaggtcgacgagatctataaagtgtacgggtccagcgagaagctgttcgacgccgactttgtgctcgagaagtccctcaaaaagaatgacgccgtggtggccattatgaaagacctgctcgactccgtgaagtccttcgaaaattacattaaagcgttctttggggaggggaaggaaactaacagggatgagtccttctatggcgactttgtcctcgcgtacgacatcctgctgaaggtcgaccacatttacgacgcgatccgcaactacgtgacacagaagccgtactccaaagacaagttcaagctgtacttccagaacccgcaatttatggggggctgggacaaggataaagagacagactaccgcgcgacaattctccgctatggctccaaatactatctggccatcatggacaagaagtacgcgaagtgcctgcagaagatcgacaaagacgacgtcaatggcaactatgaaaagatcaactacaagctgctgccgggcccgaacaagatgctcccgaaggtgttcttcagcaagaagtggatggcctactacaatccaagcgaggatattcagaaaatctataaaaacgggaccttcaagaagggggacatgtttaacctcaacgactgccacaagctcattgatttcttcaaggatagcatttcccgctacccgaaatggtccaatgcgtacgattttaacttctccgagacagaaaagtacaaagacatcgcgggcttttacagggaggtggaggagcaagggtataaagtttcttttgaatccgcgagcaagaaggaagtcgacaagctcgtcgaggagggcaagctctacatgttccaaatttataacaaggacttttccgacaagagccatgggaccccaaacctccacaccatgtacttcaaactgctctttgacgagaacaaccacgggcaaatcaggctgagcggcggcgccgaattattcatgcgcagggcctccctcaagaaggaagagctggtcgtccatccagccaattccccgatcgcgaacaagaacccggacaatccgaaaaagaccaccaccctgtcctacgacgtctacaaggacaaacgcttcagcgaagaccagtacgaattacacatcccaattgcgattaataagtgcccaaagaatatcttcaaaattaatacagaggtcagggtgctgctcaaacacgacgacaatccgtatgtcatcggcattgacaggggcgagcgcaatctgctctatatcgtggtcgtggatgggaagggcaatattgtggagcagtactccctgaacgagattatcaacaacttcaatgggattaggattaagaccgactatcacagcctgctcgacaagaaagaaaaagagaggtttgaggcccgccaaaactggacctccattgagaatatcaaagaattaaaggccggctatatttcccaagtcgtccacaagatctgcgagctggtggagaaatatgacgccgtgattgcgctcgaagacttaaattctgggttcaagaactcccgcgtgaaggtggaaaaacaggtgtatcagaaattcgagaaaatgctgatcgacaaactcaattatatggtggataagaagtccaacccgtgtgccacagggggcgcgctgaagggctatcagatcaccaacaagttcgagagcttcaagagcatgagcacccagaacgggtttattttctacatcccggcgtggctcacctccaagattgacccgagcaccggcttcgtgaacctcctgaagacaaagtatacctccattgccgacagcaagaagtttatctcctccttcgaccgcattatgtatgtgccggaggaggacctcttcgagttcgccctcgactacaaaaacttcagccgcacagatgcggattacatcaagaagtggaagctgtactcctacgggaacaggatccgcatcttcaggaatccaaaaaaaaataacgtctttgactgggaggaagtgtgcctgacatccgcctacaaggaactgttcaataaatacggcatcaattaccagcagggcgacattcgcgccctcctctgtgagcagtccgacaaagcgttttactccagcttcatggccctcatgtccctgatgctccaaatgaggaatagcatcacagggcgcaccgacgtcgacttcctcatcagcccggtgaagaactccgacgggatcttttacgactcccgcaactatgaggcgcaagagaatgcgatcctcccgaagaacgccgatgcgaacggggcctataatatcgccaggaaagtgctctgggccatcgggcagttcaaaaaggcggaggatgagaagctcgacaaggtgaaaattgccatttccaacaaggagtggctggagtacgcgcagacctccgtgaagcacggctcctctggcagctccggctctagcggctcctctggcagctccggctccaagctggagaagtttacaaactgttacagcctctccaaaaccctcaggtttaaagcgatcccggtgggcaagacccaggagaacatcgacaacaagaggctcctggtggaagacgagaagcgcgccgaagactacaagggcgtgaagaagctgctcgataggtactacctcagctttattaacgacgtgctgcacagcatcaaactcaagaatctcaacaactacatctccctcttccgcaaaaagaccggatctaagaagagaagaattaaacaagattgatagaagggctctctgtcatgatttcatactttcattattgagctctgtaattacaattatgaccatgagaacatctcttattgtgtggccttttaattgctgatgttagtactgaaccaaagcttatcgtgatgatgtaaaagcaataagtacttgtttgtagcttctttgtgtctccctttgggcttaatacatctgtttagtgttgtggctttggcatagacttctcttggtaataatgccttgcaatgcaaaatttcaattatcaaattctattatgttctcaccttatggtaacagcttaccctgtggaagatgagattcttgagttgagtcattgccaatttttggcattagcttttgaattagtgaattttgacaaaaattaccgtgacactgattttgttgaagctcttaagtgtagtttttacaaaatttcagtggctcgttgtgattatgtcaaactcacggcgaatgtagttcttacagaatttcagtggctcaaggatttaacgcgtgtatgcggccgcaaactatttaaatgcaggcgataaaaatgttttaaacgatatatattataaaaaaaaacgtttcaaaaataaatacaaaaatgtttttaaatatatataatttaactcattaaagaaaataaaaatgcaagtgcggtgacaagacaagctaaaagttgcaaaagaaatggcagggctataaggctcacctactcctggatttaccaaattttggttcgtccctatactcgaaaaataaaacaaaataaatttcagtatcttcgtttttgtatgctttgactgtgaggcgaggccaactttcttcttctgtctgagatgaattttgtttgcctcctgtgaaggatgtatcattcaaagtgaatgttttgcaactgccagtagtcccacatcgaccaaatattcttattacagtgtgtttatatagcacctggagaaggaatgggttgtttcaaagattaaataatttctactaagtgtagatcaagggactcaacatcaaaggattaatttctactaagtgtagatcaagggactcaacatcaaaggattaatttctactaagtgtagatcaagggactcaacatcaaaggattaatttctactaagtgtagatttttttttgcggccgcaacagagaaactagacctgcaggaaggcgccggcgctctcttaaggtagc

SEQ ID NO: 729 - DNA, 15555 bp, synthetic construct
  source 1..15555: mol_type = other DNA
aaggatccctgaaagcgacgttggatgttaacatctacaaattgccttttcttatcgaccatgtacgtaagcgcttacgtttttggtggacccttgaggaaactggtagctgttgtgggcctgtggactcaagatggatcattaatttccaccttcacctacgatggggggcatcgcaccggtgagtaatattgtacggctaagagcgaatttggcctgtagacctcaattgcgagctttctaatttcaaactattcgggcctaacttttggtgtgatgatgctgactggcaggatatataccgttgtaatttgagctcgtgtgaataagtcgctgtgtatgtttgtttgattgtttctgttggagtgcagcccatttcaccggacaagtcggctagattgatttagccctgatgaactgccgaggggaagccatcttgagcgcggaatgggaatggatttcgttgtacaacgacacgacagaacacccacgggaccgagcttcgaagctttaacgcttgagttaagccgcgccgcgaagcggcgtcggcttgaacgaattgttagacatcagaagaactcgtcaagaaggcgatagaaggcgatgcgctgcgaatcgggagcggcgataccgtaaagcacgaggaagcggtcagcccattcgccgccaagctcttcagcaatatcacgggtagccaacgctatgtcctgatagcggtccgccacacccagccggccacagtcgatgaatccagaaaagcggccattttccaccatgatattcggcaagcaggcatcgccatgggtcacgacgagatcctcgccgtcgggcatgcgcgccttgagcctggcgaacagttcggctggcgcgagcccctgatgctcttcgtccagatcatcctgatcgacaagaccggcttccatccgagtacgtgctcgctcgatgcgatgtttcgcttggtggtcgaatgggcaggtagccggatcaagcgtatgcagccgccgcattgcatcagccatgatggatactttctcggcaggagcaaggtgagatgacaggagatcctgccccggcacttcgcccaatagcagccagtcccttcccgcttcagtgacaacgtcgagcacagctgcgcaaggaacgcccgtcgtggccagccacgatagccgcgctgcctcgtcctgcagttcattcagggcaccggacaggtcggtcttgacaaaaagaaccgggcgcccctgcgctgacagccggaacacggcggcatcagagcagccgattgtctgttgtgcccagtcatagccgaatagcctctccacccaagcggccggagaacctgcgtgcaatccatcttgttcaatcatggctttgtttctccttcaatcattgactattgtcacgttattctgaatcgacgagaactcacatcaatctcaacaagcatctctgctcgcgaaattggtgttgtctcattaaaacgtgaccgtcaaagtctattcactaggacccaaatctctccaggtcccgcaagctagcttcgccgcccacgtttctctttcttctcatattcaattgtcaaaaaacagacctcatgaccaaaatcccttaacgtgagttttcgttccactgagcgtcagaccccgtagaaaagatcaaaggatcttcttgagatcctttttttctgcgcgtaatctgctgcttgcaaacaaaaaaaccaccgctaccagcggtggtttgtttgccggatcaagagctaccaactttttttccgaaggtaactggcttcagcagagcgcagataccaaatactgtccttctagtgtagccgtagttaggccaccacttcaagaactctgtagcaccgcctacatacctcgctctgctaatcctgttaccagtggctgctgccagtggcgataagtcgtgtcttaccgggttggactcaagacgatagttaccggataaggcgcagcggtcgggctgaacggggggttcgtgcacacagcccagcttggagcgaacgacctacaccgaactgagatacctacagcgtgagctatgagaaagcgccacgcttcccgaagggagaaaggcggacaggtatccggtaagcggcagggtcggaacaggagagcgcacgagggagcttccagggggaaacgcctggtatctttatagtcctgtcgggtttcgccacctctgacttgagcgtcgatttttgtgatgctcgtcaggggggcggagcctatggaaaaacgccagcaacgcggcctttttacggttcctggccttttgctggccttttgctcacatgttctttcctgcgttatcccctgattctgtggataaccgtattaccgcctttgagtgagctgataccgctcgccgcagccgaacgaccgagcgcagcgagtcagtgagcgaggaagcggaagagcgcctgatgcggtattttctccttacgcatctgtgcggtatttcacaccgcatatggtgcactctcagtacaatctgctctgatgccgcatagttaagccagtatacaggctctccttcacgatcaacgatcggcatggggccttcgtgcttgttgagtaatgttatcgctcccatcagagcacgcttggtactccgggaatcggatggtctgtcgatcatccaaaaaacgctcatgttttcaacctattaggtctgtggtcagctgaccacagaccatcctgctccatactcgctaattctagccaaaccgcaacgtcccctgcccgctagccttcaagagcgccattatcatcgggccaagtgaaaacttcccgagctcgctccgccgtgtcagatctcggagatagcccccgggcgaattgatgaagttcgctcgctccaaaatgcacgccatcgctgctgccgcattctccggtcccattgcctcacacgcgtcttggtaagccgacgggctgacccccagcatagaccgaaccaccaccgcagccgacatgaggtcacgccagctagcaaccgcaccgctcggcccataattgccaatggtcgggcatgctttcaggatcatcccgagggggaacgcttttatcggctcgctccttgcccggtctatttcactcggcttagcgccctgctccttttcagagcgaggttcaagttcattaacggattcgggttttgaattctgtatgtgctgctcgctctgggcagcattggtgctattattttctgaattgtctctaatttccaaccggttgattatctcttcctggagcatccacatctcttcgagaattgactctacatcagcaagcgtcggggcgcgtggaattctacccacaagttccacatagacttcctcgacagcttgccagtcgccctccgctccctcttccatagctgccgtaattagcttccgaacgtcccgtcggcaaatcgtcagactttctttggccatcctgaatgctgctcgatcggccatcacttgctgtgccatcatcgctagctcttcggaccgcgcgagaagcggagacaaatcgaagccaaacgcgcgctcgatctgaccagcgccatccttacgagcgtaacgctttccgttggcgctatccttccggacgatcaagcctgactccacgagcatggcgatgtgcctacgcaaagtcgcgccagccatcccatgcgcccgaagggcaagctgagcattcgacgggaagacgatcagctgtgcctcctgacgcaactccgtttccgggtgaaagctcaatagcgcatcaaggacggcaagactgttggactggattccaagtagttccatggccgcggacgcatctctaaagaccttccacttgtccgctgtcttgccttgtttgatatcggccagcgccgtctggcgccgcacaagcgcaagcgtcattggccgccgcccgaatggcgtcgttacacttcctgtctgcatcatctttcacctttcagcaggcaaaggaaatcagctcaccaaaacggcgctaaaaactcttgacgaggattcgaggaaatgcgattctgttcgcgctagagagacagaagggcttccgcgacggcgacgttgagggggctcttttcttttgcggtttactctccccgtttccgttggttctcagcgtggtacgcttgatacagcgctggcacatgatcgagcacgaaggtcgcaaaatcgggcgtcgccttcctgtcaatcgtgatttccagtttggccttgctctgcgtcacctgtgcaattctggtgccgtctggggtggccatgacctcgggaagtccacgcgcaacccgactgggcttcagactagcgatcaccgccttgaatcgttctgccgatggcagcgcttgaacttcctccgacatagcatatttagccacgtcggccggtgaagaaactttctcaatcagctcggcaagttgttgccaactcggccgtccaacaccaggagcggcaccaatagcatcggtcagttcagaggggagggcgtcgacgagcagaagcatcttggacaaattgctcttgtcgatcgacatcgcggcgatgacaatctctcgagaaaactgcctgttcaggcgatgtgcgaagcgcgccttttcgatgaaggtaagatcttcgcgctcattgttttcctgaccctgtgctacgaccacttgctcgtccgtcagttcgcgaacgaccgctctgaccggaagtccgagttctgaaacggcgcgtagccggcggtggccgaaggcaacctgatatcggcccggctggctcggatgcggtcgcacaaggattgggacttgctgtccttgttcccggatcgaagtaaggagcccgtcaatgtcccctcgcatacgatcctgcacgaaagacggttctattgacgaggcatccaactctatcactgcctgaccttcagcgaggcgccgctcgatctcttcggcacggctaagacgatcgttttgctctcgcagtgcgttaccaatgttcgctgtgagcttcgttgccggatcgcgctccttccttgttacgccgaggagcggcatggagcggttctttgccgtcctattgtcggcgggcgacgtttcaggggcgtcagttgacacgccaaggatgtgcttccggctcatgtgggcctaccccatgcttttttgatcagtgtttcgatctcgtcgttgacggcgttcatcgcctccaaggctcgatcataggtcgagcgcgtgaacaggccacgctccacttcgaatagagtctggtttgtcaggccagcgtccgaaaccgcggtggttttaagcatcggaaaattgaggacattttcgccaaaaatcgaccgcagataacctaccatttggttctgtggtccgtcgctcggttcgaaacgggttatcagatagcgcatccaattaaacttgaacttggcgccagcattctcgatttcacgcaaaaggttcgatgtcattgccagaaactggttcatcgacatcacatccagcatctgcggatggaccgtgacaagaatggacgtcgccgcagtcaatgcggatagcgtgagatacccaagctggggagggcagtcgatgaccacgacgtcatagttatccgcgatatcttcaattacttggctgatgcgaccataaaagagcgtgtcgccctctttgcggttcatcagcgcgcgtggcgtatcgtgttcaaactccatcagctcaaggttaccaggaatcaggtggaggtcgggaatgtaagtccctcggacgactcgttcgattgccacttgctcatcatcataccttatagcgccgtagagcgtttcgttcgggccaacgtccgtttccggttggctcccaaagagtgcagaaaggctcgcttgaggatcgagatcaatggccaagactcgatatccgcgcatagcgaggtactgcgccagatgcgcggcggtggtggtcttacccgacccacctttgaaattcatcacagagataacctgaagctgctcgccgcctcgacgatgtggcaggtagcgccggttcccgcggccgacctgatccatatacttccgaatcacatggatatcttcaattgagaacattcgcctgccacccgggctcatgctaacattcaactctggcatctcagacgcggtctgccgtaaatatgactcgccaacgccgagcagcttggacgcctccgatggcccgaatgttcgaatgcccttctcggaatgcggcgggaaaaccttaagatgatgtgcttgaagttggctcgagagggcatcggcatgacgctccatcaaggccgtcaaccctacaactacaggcgctgcttttaggacagacttcgccatctcaaacccattccttgccagtggcgatatttttcgcgaaactggaaaagttccgccgctggcaattagcgccgattctgctgtttgggcaagagcttttaggttaacagaaggttaacgccctcaggtcgaaaaactccacccaactgttatttgtatttatttccaatgccttagagagattgccatttgaatatgttcatgtattgttttagtgataatcctacaatcgtaacccaaaaagaggtcgccctctgcgcgccgtcgtccaatataggcgaagtcacccttgcgactcaggcggattctaccttgtacacgtgtcgagtggaaaagtcccatgtggatcactccgttgccccgtcgctcaccgtgttggggggaaggtgcacatggctcagttctcaatggaaattatctgcctaaccggctcagttctgcgtagaaaccaacatgcaagctccaccgggtgcaaagcggcagcggcggcaggatatattcaattgtaaatggcttcatgtccgggaaatctacatggatcagcaatgagtatgatggtcaatatggagaaaaagaaagagtaattaccaattttttttcaattcaaaaatgtagatgtccgcagcgttattataaaatgaaagtacattttgataaaacgacaaattacgatccgtcgtatttataggcgaaagcaataaacaaattattctaattcggaaatctttatttcgacgtgtctacattcacgtccaaatgggggcttagatgagaaacttcacgatcgatgcggccctgccggcgcgccactagtcaacaattggccaatctttgttctaaattgctaataaacgaccatttccgtcaattctccttggttgcaacagtctacccgtcaaatgtttactaatttataagtgtgaagtttgaattatgaaagacgaaatcgtattaaaaattcacaagaataaacaactccatagattttcaaaaaaacagtcacgagaaaaaaaccacagtccgtttgtctgctcttctagtttttattatttttctattaatagttttttgttatttcgagaataaaatttgaacgatgtccgaaccacaaaagccgagccgataaatcctaagccgagcctaactttagccgtaaccatcagtcacggctcccgggctaattcatttgaaccgaatcataatcaacggtttagatcaaactcaaaacaatctaacggcaacatagacgcgtcggtgagctaaaaagagtgtgaaagccaggtcaccatagcattgtctctcccagattttttatttgggaaataatagaagaaatagaaaaaaataaaagagtgagaaaaatcgtagagctatatattcgcacatgtactcgtttcgctttccttagtgttagctgctgccgctgttgtttctcctccatttctctatctttctctctcgctgcttctcgaatcttctgtatcatcttcttcttcttcaaggtgagtctctagatccgttcgcttgattttgctgctcgttagtcgttattgttgattctctatgccgatttcgctagatctgtttagcatgcgttgtggttttatgagaaaatctttgttttgggggttgcttgttatgtgattcgatccgtgcttgttggatcgatctgagctaattcttaaggtttatgtgttagatctatggagtttgaggattcttctcgcttctgtcgatctctcgctgttatttttgtttttttcagtgaagtgaagttgtttagttcgaaatgacttcgtgtatgctcgattgatctggttttaatcttcgatctgttaggtgttgatgtttacaagtgaattctagtgttttctcgttgagatctgtgaagtttgaacctagttttctcaataatcaacatatgaagcgatgtttgagtttcaataaacgctgctaatcttcgaaactaagttgtgatctgattcgtgtttacttcatgagcttatccaattcatttcggtttcattttactttttttttagtgaaccatggcgcaagttagcagaatctgcaatggtgtgcagaacccatctcttatctccaatctctcgaaatccagtcaacgcaaatctcccttatcggtttctctgaagacgcagcagcatccacgagcttatccgatttcgtcgtcgtggggattgaagaagagtgggatgacgttaattggctctgagcttcgtcctcttaaggtcatgtcttctgtttccacggcgtgcatgggggaagcggtgatcgccgaagtatcgactcaactatcagaggtagttggcgtcatcgagcgccatctcgaaccgacgttgctggccgtacatttgtacggctccgcagtggatggcggcctgaagccacacagtgatattgatttgctggttacggtgaccgtaaggcttgatgaaacaacgcggcgagctttgatcaacgaccttttggaaacttcggcttcccctggagagagcgagattctccgcgctgtagaagtcaccattgttgtgcacgacgacatcattccgtggcgttatccagctaagcgcgaactgcaatttggagaatggcagcgcaatgacattcttgcaggtatcttcgagccagccacgatcgacattgatctggctatcttgctgacaaaagcaagagaacatagcgttgccttggtaggtccagcggcggaggaactctttgatccggttcctgaacaggatctatttgaggcgctaaatgaaaccttaacgctatggaactcgccgcccgactgggctggcgatgagcgaaatgtagtgcttacgttgtcccgcatttggtacagcgcagtaaccggcaaaatcgcgccgaaggatgtcgctgccgactgggcaatggagcgcctgccggcccagtatcagcccgtcatacttgaagctagacaggcttatcttggacaagaagaagatcgcttggcctcgcgcgcagatcagttggaagaatttgtccactacgtgaaaggcgagatcaccaaggtagtcggcaaataaggatcaattcccgatcgttcaaacatttggcaataaagtttcttaagattgaatcctgttgccggtcttgcgatgattatcatataatttctgttgaattacgttaagcatgtaataattaacatgtaatgcatgacgttatttatgagatgggtttttatgattagagtcccgcaattatacatttaatacgcgatagaaaacaaaatatagcgcgcaaactaggataaattatcgcgcgcggtgtcatctatgttactagatcacgcgtgtatgcaatatcctgcagggtattaattaattatgccctaagacatcctggaccaatatgctgaagattatgctacctacaccaggataggacttgaagcacttaaccttgaagattggttcgaagaaccagaacccgatccacctaaccctgtggaccgccagaggatagaggacatcctggacctactgaacgtcagcaatgacgactgaaagattcccaggacaccggcggaagtggtggacccagtctaggtgcgatgcttagtcgcgcacgatgactatgtcggaaggcatctttgctttcggcaaactttagtaatactttaaggaaagtattgtacaagttaggtgcagagacaataatgcacccagctttagctttgtttatggaattattgtgtcggttgcattattggatgcctgcgtgcaccctaagcaatcaacggagaaacaaagataaaaatcaattactcacatgaaagagtattgatcacgagtcactatggagcgacaatctccagacaggatgtcagcatcttatcttcctttgaagaaagcatcatcaataacgatgtaatggtggggacatccactaagttattgctctgcaaacagctcaaaaagctactggccgacaatcataattgctcggcatgtccaggtggggcctccactagcaataatacaagctttacagcttgcagtgactcatcctccaataatggagaaaaagacgtcagcagtgacgaacaagggtcgaaagacttgcctatataagggcattctcccctcagttgaagatcatcgaaagttggagcaataaactctctcttcaacaaatctatcttttatcttttatcgccgcaatggcgggatctaagaagagaagaattaaacaagatggctataccagcgacgaggaggtgctggaagtcttccgcaacacactgaataagaatagcgagattttctcctccatcaagaagctcgagaagctctttaagaactttgacgagtacagctccgccgggattttcgtgaagaacgggccggcgatcagcaccatctccaaggacatctttggcgagtggaacgtcatcagggacaagtggaacgccgagtacgacgacatccacctgaagaagaaggcggtggtgaccgagaagtatgaggacgatcgcaggaagtccttcaaaaaaatcggctccttcagcctcgaacagctccaggagtatgccgatgcggatctgtccgtcgtcgagaagctgaaggaaatcatcattcagaaggtcgacgagatctataaagtgtacgggtccagcgagaagctgttcgacgccgactttgtgctcgagaagtccctcaaaaagaatgacgccgtggtggccattatgaaagacctgctcgactccgtgaagtccttcgaaaattacattaaagcgttctttggggaggggaaggaaactaacagggatgagtccttctatggcgactttgtcctcgcgtacgacatcctgctgaaggtcgaccacatttacgacgcgatccgcaactacgtgacacagaagccgtactccaaagacaagttcaagctgtacttccagaacccgcaatttatggggggctgggacaaggataaagagacagactaccgcgcgacaattctccgctatggctccaaatactatctggccatcatggacaagaagtacgcgaagtgcctgcagaagatcgacaaagacgacgtcaatggcaactatgaaaagatcaactacaagctgctgccgggcccgaacaagatgctcccgaaggtgttcttcagcaagaagtggatggcctactacaatccaagcgaggatattcagaaaatctataaaaacgggaccttcaagaagggggacatgtttaacctcaacgactgccacaagctcattgatttcttcaaggatagcatttcccgctacccgaaatggtccaatgcgtacgattttaacttctccgagacagaaaagtacaaagacatcgcgggcttttacagggaggtggaggagcaagggtataaagtttcttttgaatccgcgagcaagaaggaagtcgacaagctcgtcgaggagggcaagctctacatgttccaaatttataacaaggacttttccgacaagagccatgggaccccaaacctccacaccatgtacttcaaactgctctttgacgagaacaaccacgggcaaatcaggctgagcggcggcgccgaattattcatgcgcagggcctccctcaagaaggaagagctggtcgtccatccagccaattccccgatcgcgaacaagaacccggacaatccgaaaaagaccaccaccctgtcctacgacgtctacaaggacaaacgcttcagcgaagaccagtacgaattacacatcccaattgcgattaataagtgcccaaagaatatcttcaaaattaatacagaggtcagggtgctgctcaaacacgacgacaatccgtatgtcatcggcattgacaggggcgagcgcaatctgctctatatcgtggtcgtggatgggaagggcaatattgtggagcagtactccctgaacgagattatcaacaacttcaatgggattaggattaagaccgactatcacagcctgctcgacaagaaagaaaaagagaggtttgaggcccgccaaaactggacctccattgagaatatcaaagaattaaaggccggctatatttcccaagtcgtccacaagatctgcgagctggtggagaaatatgacgccgtgattgcgctcgaagacttaaattctgggttcaagaactcccgcgtgaaggtggaaaaacaggtgtatcagaaattcgagaaaatgctgatcgacaaactcaattatatggtggataagaagtccaacccgtgtgccacagggggcgcgctgaagggctatcagatcaccaacaagttcgagagcttcaagagcatgagcacccagaacgggtttattttctacatcccggcgtggctcacctccaagattgacccgagcaccggcttcgtgaacctcctgaagacaaagtatacctccattgccgacagcaagaagtttatctcctccttcgaccgcattatgtatgtgccggaggaggacctcttcgagttcgccctcgactacaaaaacttcagccgcacagatgcggattacatcaagaagtggaagctgtactcctacgggaacaggatccgcatcttcaggaatccaaaaaaaaataacgtctttgactgggaggaagtgtgcctgacatccgcctacaaggaactgttcaataaatacggcatcaattaccagcagggcgacattcgcgccctcctctgtgagcagtccgacaaagcgttttactccagcttcatggccctcatgtccctgatgctccaaatgaggaatagcatcacagggcgcaccgacgtcgacttcctcatcagcccggtgaagaactccgacgggatcttttacgactcccgcaactatgaggcgcaagagaatgcgatcctcccgaagaacgccgatgcgaacggggcctataatatcgccaggaaagtgctctgggccatcgggcagttcaaaaaggcggaggatgagaagctcgacaaggtgaaaattgccatttccaacaaggagtggctggagtacgcgcagacctccgtgaagcacggctcctctggcagctccggctctagcggctcctctggcagctccggctccaagctggagaagtttacaaactgttacagcctctccaaaaccctcaggtttaaagcgatcccggtgggcaagacccaggagaacatcgacaacaagaggctcctggtggaagacgagaagcgcgccgaagactacaagggcgtgaagaagctgctcgataggtactacctcagctttattaacgacgtgctgcacagcatcaaactcaagaatctcaacaactacatctccctcttccgcaaaaagacccgcaccgagaaggagaacaaggagctggagaacctggagatcaacctccgcaaggaaatcgccaaagcgttcaagggcaatgaagggtacaagagcctcttcaagaaagacatcatcgaaactatcctcccagagtttctcgatgacaaggacgagatcgcgctggtgaactcctttaacgggttcacaaccgcgtttaccggcttctttgataacagggaaaatatgttctccgaggaggccaagtccaccagcatcgccttcaggtgtatcaacgagaacctcacccgctacatttccaatatggacattttcgagaaggtggatgcgatcttcgataagcacgaggtgcaggagatcaaagagaagattctcaattccgattatgacgtcgaggatttcttcgaaggggagttctttaattttgtgctcacacaagagggcattgacgtgtacaacgcgattatcgggggcttcgtcacagagtccggggagaagattaaggggctgaatgagtacatcaatctgtacaatcagaagaccaagcagaaactgccgaaattcaagccgctctacaagcaagtcctgtccgatagggaaagcctctccttctacggcgagggatctaagaagagaagaattaaacaagattgatagaagggctctctgtcatgatttcatactttcattattgagctctgtaattacaattatgaccatgagaacatctcttattgtgtggccttttaattgctgatgttagtactgaaccaaagcttatcgtgatgatgtaaaagcaataagtacttgtttgtagcttctttgtgtctccctttgggcttaatacatctgtttagtgttgtggctttggcatagacttctcttggtaataatgccttgcaatgcaaaatttcaattatcaaattctattatgttctcaccttatggtaacagcttaccctgtggaagatgagattcttgagttgagtcattgccaatttttggcattagcttttgaattagtgaattttgacaaaaattaccgtgacactgattttgttgaagctcttaagtgtagtttttacaaaatttcagtggctcgttgtgattatgtcaaactcacggcgaatgtagttcttacagaatttcagtggctcaaggatttaacgcgtgtatgcggccgcaaactatttaaatgcaggcgataaaaatgttttaaacgatatatattataaaaaaaaacgtttcaaaaataaatacaaaaatgtttttaaatatatataatttaactcattaaagaaaataaaaatgcaagtgcggtgacaagacaagctaaaagttgcaaaagaaatggcagggctataaggctcacctactcctggatttaccaaattttggttcgtccctatactcgaaaaataaaacaaaataaatttcagtatcttcgtttttgtatgctttgactgtgaggcgaggccaactttcttcttctgtctgagatgaattttgtttgcctcctgtgaaggatgtatcattcaaagtgaatgttttgcaactgccagtagtcccacatcgaccaaatattcttattacagtgtgtttatatagcacctggagaaggaatgggttgtttcaaagattaaataatttctactaagtgtagatcaagggactcaacatcaaaggattaatttctactaagtgtagatcaagggactcaacatcaaaggattaatttctactaagtgtagatcaagggactcaacatcaaaggattaatttctactaagtgtagatttttttttgcggccgcaacagagaaactagacctgcaggaaggcgccggcgctctcttaaggtagc

SEQ ID NO: 730 - DNA, 15555 bp, synthetic construct
  source 1..15555: mol_type = other DNA
aaggatccctgaaagcgacgttggatgttaacatctacaaattgccttttcttatcgaccatgtacgtaagcgcttacgtttttggtggacccttgaggaaactggtagctgttgtgggcctgtggactcaagatggatcattaatttccaccttcacctacgatggggggcatcgcaccggtgagtaatattgtacggctaagagcgaatttggcctgtagacctcaattgcgagctttctaatttcaaactattcgggcctaacttttggtgtgatgatgctgactggcaggatatataccgttgtaatttgagctcgtgtgaataagtcgctgtgtatgtttgtttgattgtttctgttggagtgcagcccatttcaccggacaagtcggctagattgatttagccctgatgaactgccgaggggaagccatcttgagcgcggaatgggaatggatttcgttgtacaacgacacgacagaacacccacgggaccgagcttcgaagctttaacgcttgagttaagccgcgccgcgaagcggcgtcggcttgaacgaattgttagacatcagaagaactcgtcaagaaggcgatagaaggcgatgcgctgcgaatcgggagcggcgataccgtaaagcacgaggaagcggtcagcccattcgccgccaagctcttcagcaatatcacgggtagccaacgctatgtcctgatagcggtccgccacacccagccggccacagtcgatgaatccagaaaagcggccattttccaccatgatattcggcaagcaggcatcgccatgggtcacgacgagatcctcgccgtcgggcatgcgcgccttgagcctggcgaacagttcggctggcgcgagcccctgatgctcttcgtccagatcatcctgatcgacaagaccggcttccatccgagtacgtgctcgctcgatgcgatgtttcgcttggtggtcgaatgggcaggtagccggatcaagcgtatgcagccgccgcattgcatcagccatgatggatactttctcggcaggagcaaggtgagatgacaggagatcctgccccggcacttcgcccaatagcagccagtcccttcccgcttcagtgacaacgtcgagcacagctgcgcaaggaacgcccgtcgtggccagccacgatagccgcgctgcctcgtcctgcagttcattcagggcaccggacaggtcggtcttgacaaaaagaaccgggcgcccctgcgctgacagccggaacacggcggcatcagagcagccgattgtctgttgtgcccagtcatagccgaatagcctctccacccaagcggccggagaacctgcgtgcaatccatcttgttcaatcatggctttgtttctccttcaatcattgactattgtcacgttattctgaatcgacgagaactcacatcaatctcaacaagcatctctgctcgcgaaattggtgttgtctcattaaaacgtgaccgtcaaagtctattcactaggacccaaatctctccaggtcccgcaagctagcttcgccgcccacgtttctctttcttctcatattcaattgtcaaaaaacagacctcatgaccaaaatcccttaacgtgagttttcgttccactgagcgtcagaccccgtagaaaagatcaaaggatcttcttgagatcctttttttctgcgcgtaatctgctgcttgcaaacaaaaaaaccaccgctaccagcggtggtttgtttgccggatcaagagctaccaactttttttccgaaggtaactggcttcagcagagcgcagataccaaatactgtccttctagtgtagccgtagttaggccaccacttcaagaactctgtagcaccgcctacatacctcgctctgctaatcctgttaccagtggctgctgccagtggcgataagtcgtgtcttaccgggttggactcaagacgatagttaccggataaggcgcagcggtcgggctgaacggggggttcgtgcacacagcccagcttggagcgaacgacctacaccgaactgagatacctacagcgtgagctatgagaaagcgccacgcttcccgaagggagaaaggcggacaggtatccggtaagcggcagggtcggaacaggagagcgcacgagggagcttccagggggaaacgcctggtatctttatagtcctgtcgggtttcgccacctctgacttgagcgtcgatttttgtgatgctcgtcaggggggcggagcctatggaaaaacgccagcaacgcggcctttttacggttcctggccttttgctggccttttgctcacatgttctttcctgcgttatcccctgattctgtggataaccgtattaccgcctttgagtgagctgataccgctcgccgcagccgaacgaccgagcgcagcgagtcagtgagcgaggaagcggaagagcgcctgatgcggtattttctccttacgcatctgtgcggtatttcacaccgcatatggtgcactctcagtacaatctgctctgatgccgcatagttaagccagtatacaggctctccttcacgatcaacgatcggcatggggccttcgtgcttgttgagtaatgttatcgctcccatcagagcacgcttggtactccgggaatcggatggtctgtcgatcatccaaaaaacgctcatgttttcaacctattaggtctgtggtcagctgaccacagaccatcctgctccatactcgctaattctagccaaaccgcaacgtcccctgcccgctagccttcaagagcgccattatcatcgggccaagtgaaaacttcccgagctcgctccgccgtgtcagatctcggagatagcccccgggcgaattgatgaagttcgctcgctccaaaatgcacgccatcgctgctgccgcattctccggtcccattgcctcacacgcgtcttggtaagccgacgggctgacccccagcatagaccgaaccaccaccgcagccgacatgaggtcacgccagctagcaaccgcaccgctcggcccataattgccaatggtcgggcatgctttcaggatcatcccgagggggaacgcttttatcggctcgctccttgcccggtctatttcactcggcttagcgccctgctccttttcagagcgaggttcaagttcattaacggattcgggttttgaattctgtatgtgctgctcgctctgggcagcattggtgctattattttctgaattgtctctaatttccaaccggttgattatctcttcctggagcatccacatctcttcgagaattgactctacatcagcaagcgtcggggcgcgtggaattctacccacaagttccacatagacttcctcgacagcttgccagtcgccctccgctccctcttccatagctgccgtaattagcttccgaacgtcccgtcggcaaatcgtcagactttctttggccatcctgaatgctgctcgatcggccatcacttgctgtgccatcatcgctagctcttcggaccgcgcgagaagcggagacaaatcgaagccaaacgcgcgctcgatctgaccagcgccatccttacgagcgtaacgctttccgttggcgctatccttccggacgatcaagcctgactccacgagcatggcgatgtgcctacgcaaagtcgcgccagccatcccatgcgcccgaagggcaagctgagcattcgacgggaagacgatcagctgtgcctcctgacgcaactccgtttccgggtgaaagctcaatagcgcatcaaggacggcaagactgttggactggattccaagtagttccatggccgcggacgcatctctaaagaccttccacttgtccgctgtcttgccttgtttgatatcggccagcgccgtctggcgccgcacaagcgcaagcgtcattggccgccgcccgaatggcgtcgttacacttcctgtctgcatcatctttcacctttcagcaggcaaaggaaatcagctcaccaaaacggcgctaaaaactcttgacgaggattcgaggaaatgcgattctgttcgcgctagagagacagaagggcttccgcgacggcgacgttgagggggctcttttcttttgcggtttactctccccgtttccgttggttctcagcgtggtacgcttgatacagcgctggcacatgatcgagcacgaaggtcgcaaaatcgggcgtcgccttcctgtcaatcgtgatttccagtttggccttgctctgcgtcacctgtgcaattctggtgccgtctggggtggccatgacctcgggaagtccacgcgcaacccgactgggcttcagactagcgatcaccgccttgaatcgttctgccgatggcagcgcttgaacttcctccgacatagcatatttagccacgtcggccggtgaagaaactttctcaatcagctcggcaagttgttgccaactcggccgtccaacaccaggagcggcaccaatagcatcggtcagttcagaggggagggcgtcgacgagcagaagcatcttggacaaattgctcttgtcgatcgacatcgcggcgatgacaatctctcgagaaaactgcctgttcaggcgatgtgcgaagcgcgccttttcgatgaaggtaagatcttcgcgctcattgttttcctgaccctgtgctacgaccacttgctcgtccgtcagttcgcgaacgaccgctctgaccggaagtccgagttctgaaacggcgcgtagccggcggtggccgaaggcaacctgatatcggcccggctggctcggatgcggtcgcacaaggattgggacttgctgtccttgttcccggatcgaagtaaggagcccgtcaatgtcccctcgcatacgatcctgcacgaaagacggttctattgacgaggcatccaactctatcactgcctgaccttcagcgaggcgccgctcgatctcttcggcacggctaagacgatcgttttgctctcgcagtgcgttaccaatgttcgctgtgagcttcgttgccggatcgcgctccttccttgttacgccgaggagcggcatggagcggttctttgccgtcctattgtcggcgggcgacgtttcaggggcgtcagttgacacgccaaggatgtgcttccggctcatgtgggcctaccccatgcttttttgatcagtgtttcgatctcgtcgttgacggcgttcatcgcctccaaggctcgatcataggtcgagcgcgtgaacaggccacgctccacttcgaatagagtctggtttgtcaggccagcgtccgaaaccgcggtggttttaagcatcggaaaattgaggacattttcgccaaaaatcgaccgcagataacctaccatttggttctgtggtccgtcgctcggttcgaaacgggttatcagatagcgcatccaattaaacttgaacttggcgccagcattctcgatttcacgcaaaaggttcgatgtcattgccagaaactggttcatcgacatcacatccagcatctgcggatggaccgtgacaagaatggacgtcgccgcagtcaatgcggatagcgtgagatacccaagctggggagggcagtcgatgaccacgacgtcatagttatccgcgatatcttcaattacttggctgatgcgaccataaaagagcgtgtcgccctctttgcggttcatcagcgcgcgtggcgtatcgtgttcaaactccatcagctcaaggttaccaggaatcaggtggaggtcgggaatgtaagtccctcggacgactcgttcgattgccacttgctcatcatcataccttatagcgccgtagagcgtttcgttcgggccaacgtccgtttccggttggctcccaaagagtgcagaaaggctcgcttgaggatcgagatcaatggccaagactcgatatccgcgcatagcgaggtactgcgccagatgcgcggcggtggtggtcttacccgacccacctttgaaattcatcacagagataacctgaagctgctcgccgcctcgacgatgtggcaggtagcgccggttcccgcggccgacctgatccatatacttccgaatcacatggatatcttcaattgagaacattcgcctgccacccgggctcatgctaacattcaactctggcatctcagacgcggtctgccgtaaatatgactcgccaacgccgagcagcttggacgcctccgatggcccgaatgttcgaatgcccttctcggaatgcggcgggaaaaccttaagatgatgtgcttgaagttggctcgagagggcatcggcatgacgctccatcaaggccgtcaaccctacaactacaggcgctgcttttaggacagacttcgccatctcaaacccattccttgccagtggcgatatttttcgcgaaactggaaaagttccgccgctggcaattagcgccgattctgctgtttgggcaagagcttttaggttaacagaaggttaacgccctcaggtcgaaaaactccacccaactgttatttgtatttatttccaatgccttagagagattgccatttgaatatgttcatgtattgttttagtgataatcctacaatcgtaacccaaaaagaggtcgccctctgcgcgccgtcgtccaatataggcgaagtcacccttgcgactcaggcggattctaccttgtacacgtgtcgagtggaaaagtcccatgtggatcactccgttgccccgtcgctcaccgtgttggggggaaggtgcacatggctcagttctcaatggaaattatctgcctaaccggctcagttctgcgtagaaaccaacatgcaagctccaccgggtgcaaagcggcagcggcggcaggatatattcaattgtaaatggcttcatgtccgggaaatctacatggatcagcaatgagtatgatggtcaatatggagaaaaagaaagagtaattaccaattttttttcaattcaaaaatgtagatgtccgcagcgttattataaaatgaaagtacattttgataaaacgacaaattacgatccgtcgtatttataggcgaaagcaataaacaaattattctaattcggaaatctttatttcgacgtgtctacattcacgtccaaatgggggcttagatgagaaacttcacgatcgatgcggccctgccggcgcgccactagtcaacaattggccaatctttgttctaaattgctaataaacgaccatttccgtcaattctccttggttgcaacagtctacccgtcaaatgtttactaatttataagtgtgaagtttgaattatgaaagacgaaatcgtattaaaaattcacaagaataaacaactccatagattttcaaaaaaacagtcacgagaaaaaaaccacagtccgtttgtctgctcttctagtttttattatttttctattaatagttttttgttatttcgagaataaaatttgaacgatgtccgaaccacaaaagccgagccgataaatcctaagccgagcctaactttagccgtaaccatcagtcacggctcccgggctaattcatttgaaccgaatcataatcaacggtttagatcaaactcaaaacaatctaacggcaacatagacgcgtcggtgagctaaaaagagtgtgaaagccaggtcaccatagcattgtctctcccagattttttatttgggaaataatagaagaaatagaaaaaaataaaagagtgagaaaaatcgtagagctatatattcgcacatgtactcgtttcgctttccttagtgttagctgctgccgctgttgtttctcctccatttctctatctttctctctcgctgcttctcgaatcttctgtatcatcttcttcttcttcaaggtgagtctctagatccgttcgcttgattttgctgctcgttagtcgttattgttgattctctatgccgatttcgctagatctgtttagcatgcgttgtggttttatgagaaaatctttgttttgggggttgcttgttatgtgattcgatccgtgcttgttggatcgatctgagctaattcttaaggtttatgtgttagatctatggagtttgaggattcttctcgcttctgtcgatctctcgctgttatttttgtttttttcagtgaagtgaagttgtttagttcgaaatgacttcgtgtatgctcgattgatctggttttaatcttcgatctgttaggtgttgatgtttacaagtgaattctagtgttttctcgttgagatctgtgaagtttgaacctagttttctcaataatcaacatatgaagcgatgtttgagtttcaataaacgctgctaatcttcgaaactaagttgtgatctgattcgtgtttacttcatgagcttatccaattcatttcggtttcattttactttttttttagtgaaccatggcgcaagttagcagaatctgcaatggtgtgcagaacccatctcttatctccaatctctcgaaatccagtcaacgcaaatctcccttatcggtttctctgaagacgcagcagcatccacgagcttatccgatttcgtcgtcgtggggattgaagaagagtgggatgacgttaattggctctgagcttcgtcctcttaaggtcatgtcttctgtttccacggcgtgcatgggggaagcggtgatcgccgaagtatcgactcaactatcagaggtagttggcgtcatcgagcgccatctcgaaccgacgttgctggccgtacatttgtacggctccgcagtggatggcggcctgaagccacacagtgatattgatttgctggttacggtgaccgtaaggcttgatgaaacaacgcggcgagctttgatcaacgaccttttggaaacttcggcttcccctggagagagcgagattctccgcgctgtagaagtcaccattgttgtgcacgacgacatcattccgtggcgttatccagctaagcgcgaactgcaatttggagaatggcagcgcaatgacattcttgcaggtatcttcgagccagccacgatcgacattgatctggctatcttgctgacaaaagcaagagaacatagcgttgccttggtaggtccagcggcggaggaactctttgatccggttcctgaacaggatctatttgaggcgctaaatgaaaccttaacgctatggaactcgccgcccgactgggctggcgatgagcgaaatgtagtgcttacgttgtcccgcatttggtacagcgcagtaaccggcaaaatcgcgccgaaggatgtcgctgccgactgggcaatggagcgcctgccggcccagtatcagcccgtcatacttgaagctagacaggcttatcttggacaagaagaagatcgcttggcctcgcgcgcagatcagttggaagaatttgtccactacgtgaaaggcgagatcaccaaggtagtcggcaaataaggatcaattcccgatcgttcaaacatttggcaataaagtttcttaagattgaatcctgttgccggtcttgcgatgattatcatataatttctgttgaattacgttaagcatgtaataattaacatgtaatgcatgacgttatttatgagatgggtttttatgattagagtcccgcaattatacatttaatacgcgatagaaaacaaaatatagcgcgcaaactaggataaattatcgcgcgcggtgtcatctatgttactagatcacgcgtgtatgcaatatcctgcagggtattaattaattatgccctaagacatcctggaccaatatgctgaagattatgctacctacaccaggataggacttgaagcacttaaccttgaagattggttcgaagaaccagaacccgatccacctaaccctgtggaccgccagaggatagaggacatcctggacctactgaacgtcagcaatgacgactgaaagattcccaggacaccggcggaagtggtggacccagtctaggtgcgatgcttagtcgcgcacgatgactatgtcggaaggcatctttgctttcggcaaactttagtaatactttaaggaaagtattgtacaagttaggtgcagagacaataatgcacccagctttagctttgtttatggaattattgtgtcggttgcattattggatgcctgcgtgcaccctaagcaatcaacggagaaacaaagataaaaatcaattactcacatgaaagagtattgatcacgagtcactatggagcgacaatctccagacaggatgtcagcatcttatcttcctttgaagaaagcatcatcaataacgatgtaatggtggggacatccactaagttattgctctgcaaacagctcaaaaagctactggccgacaatcataattgctcggcatgtccaggtggggcctccactagcaataatacaagctttacagcttgcagtgactcatcctccaataatggagaaaaagacgtcagcagtgacgaacaagggtcgaaagacttgcctatataagggcattctcccctcagttgaagatcatcgaaagttggagcaataaactctctcttcaacaaatctatcttttatcttttatcgccgcaatggcgggatctaagaagagaagaattaaacaagattccgacgggatcttttacgactcccgcaactatgaggcgcaagagaatgcgatcctcccgaagaacgccgatgcgaacggggcctataatatcgccaggaaagtgctctgggccatcgggcagttcaaaaaggcggaggatgagaagctcgacaaggtgaaaattgccatttccaacaaggagtggctggagtacgcgcagacctccgtgaagcacggctcctctggcagctccggctctagcggctcctctggcagctccggctccaagctggagaagtttacaaactgttacagcctctccaaaaccctcaggtttaaagcgatcccggtgggcaagacccaggagaacatcgacaacaagaggctcctggtggaagacgagaagcgcgccgaagactacaagggcgtgaagaagctgctcgataggtactacctcagctttattaacgacgtgctgcacagcatcaaactcaagaatctcaacaactacatctccctcttccgcaaaaagacccgcaccgagaaggagaacaaggagctggagaacctggagatcaacctccgcaaggaaatcgccaaagcgttcaagggcaatgaagggtacaagagcctcttcaagaaagacatcatcgaaactatcctcccagagtttctcgatgacaaggacgagatcgcgctggtgaactcctttaacgggttcacaaccgcgtttaccggcttctttgataacagggaaaatatgttctccgaggaggccaagtccaccagcatcgccttcaggtgtatcaacgagaacctcacccgctacatttccaatatggacattttcgagaaggtggatgcgatcttcgataagcacgaggtgcaggagatcaaagagaagattctcaattccgattatgacgtcgaggatttcttcgaaggggagttctttaattttgtgctcacacaagagggcattgacgtgtacaacgcgattatcgggggcttcgtcacagagtccggggagaagattaaggggctgaatgagtacatcaatctgtacaatcagaagaccaagcagaaactgccgaaattcaagccgctctacaagcaagtcctgtccgatagggaaagcctctccttctacggcgagggctataccagcgacgaggaggtgctggaagtcttccgcaacacactgaataagaatagcgagattttctcctccatcaagaagctcgagaagctctttaagaactttgacgagtacagctccgccgggattttcgtgaagaacgggccggcgatcagcaccatctccaaggacatctttggcgagtggaacgtcatcagggacaagtggaacgccgagtacgacgacatccacctgaagaagaaggcggtggtgaccgagaagtatgaggacgatcgcaggaagtccttcaaaaaaatcggctccttcagcctcgaacagctccaggagtatgccgatgcggatctgtccgtcgtcgagaagctgaaggaaatcatcattcagaaggtcgacgagatctataaagtgtacgggtccagcgagaagctgttcgacgccgactttgtgctcgagaagtccctcaaaaagaatgacgccgtggtggccattatgaaagacctgctcgactccgtgaagtccttcgaaaattacattaaagcgttctttggggaggggaaggaaactaacagggatgagtccttctatggcgactttgtcctcgcgtacgacatcctgctgaaggtcgaccacatttacgacgcgatccgcaactacgtgacacagaagccgtactccaaagacaagttcaagctgtacttccagaacccgcaatttatggggggctgggacaaggataaagagacagactaccgcgcgacaattctccgctatggctccaaatactatctggccatcatggacaagaagtacgcgaagtgcctgcagaagatcgacaaagacgacgtcaatggcaactatgaaaagatcaactacaagctgctgccgggcccgaacaagatgctcccgaaggtgttcttcagcaagaagtggatggcctactacaatccaagcgaggatattcagaaaatctataaaaacgggaccttcaagaagggggacatgtttaacctcaacgactgccacaagctcattgatttcttcaaggatagcatttcccgctacccgaaatggtccaatgcgtacgattttaacttctccgagacagaaaagtacaaagacatcgcgggcttttacagggaggtggaggagcaagggtataaagtttcttttgaatccgcgagcaagaaggaagtcgacaagctcgtcgaggagggcaagctctacatgttccaaatttataacaaggacttttccgacaagagccatgggaccccaaacctccacaccatgtacttcaaactgctctttgacgagaacaaccacgggcaaatcaggctgagcggcggcgccgaattattcatgcgcagggcctccctcaagaaggaagagctggtcgtccatccagccaattccccgatcgcgaacaagaacccggacaatccgaaaaagaccaccaccctgtcctacgacgtctacaaggacaaacgcttcagcgaagaccagtacgaattacacatcccaattgcgattaataagtgcccaaagaatatcttcaaaattaatacagaggtcagggtgctgctcaaacacgacgacaatccgtatgtcatcggcattgacaggggcgagcgcaatctgctctatatcgtggtcgtggatgggaagggcaatattgtggagcagtactccctgaacgagattatcaacaacttcaatgggattaggattaagaccgactatcacagcctgctcgacaagaaagaaaaagagaggtttgaggcccgccaaaactggacctccattgagaatatcaaagaattaaaggccggctatatttcccaagtcgtccacaagatctgcgagctggtggagaaatatgacgccgtgattgcgctcgaagacttaaattctgggttcaagaactcccgcgtgaaggtggaaaaacaggtgtatcagaaattcgagaaaatgctgatcgacaaactcaattatatggtggataagaagtccaacccgtgtgccacagggggcgcgctgaagggctatcagatcaccaacaagttcgagagcttcaagagcatgagcacccagaacgggtttattttctacatcccggcgtggctcacctccaagattgacccgagcaccggcttcgtgaacctcctgaagacaaagtatacctccattgccgacagcaagaagtttatctcctccttcgaccgcattatgtatgtgccggaggaggacctcttcgagttcgccctcgactacaaaaacttcagccgcacagatgcggattacatcaagaagtggaagctgtactcctacgggaacaggatccgcatcttcaggaatccaaaaaaaaataacgtctttgactgggaggaagtgtgcctgacatccgcctacaaggaactgttcaataaatacggcatcaattaccagcagggcgacattcgcgccctcctctgtgagcagtccgacaaagcgttttactccagcttcatggccctcatgtccctgatgctccaaatgaggaatagcatcacagggcgcaccgacgtcgacttcctcatcagcccggtgaagaacggatctaagaagagaagaattaaacaagattgatagaagggctctctgtcatgatttcatactttcattattgagctctgtaattacaattatgaccatgagaacatctcttattgtgtggccttttaattgctgatgttagtactgaaccaaagcttatcgtgatgatgtaaaagcaataagtacttgtttgtagcttctttgtgtctccctttgggcttaatacatctgtttagtgttgtggctttggcatagacttctcttggtaataatgccttgcaatgcaaaatttcaattatcaaattctattatgttctcaccttatggtaacagcttaccctgtggaagatgagattcttgagttgagtcattgccaatttttggcattagcttttgaattagtgaattttgacaaaaattaccgtgacactgattttgttgaagctcttaagtgtagtttttacaaaatttcagtggctcgttgtgattatgtcaaactcacggcgaatgtagttcttacagaatttcagtggctcaaggatttaacgcgtgtatgcggccgcaaactatttaaatgcaggcgataaaaatgttttaaacgatatatattataaaaaaaaacgtttcaaaaataaatacaaaaatgtttttaaatatatataatttaactcattaaagaaaataaaaatgcaagtgcggtgacaagacaagctaaaagttgcaaaagaaatggcagggctataaggctcacctactcctggatttaccaaattttggttcgtccctatactcgaaaaataaaacaaaataaatttcagtatcttcgtttttgtatgctttgactgtgaggcgaggccaactttcttcttctgtctgagatgaattttgtttgcctcctgtgaaggatgtatcattcaaagtgaatgttttgcaactgccagtagtcccacatcgaccaaatattcttattacagtgtgtttatatagcacctggagaaggaatgggttgtttcaaagattaaataatttctactaagtgtagatcaagggactcaacatcaaaggattaatttctactaagtgtagatcaagggactcaacatcaaaggattaatttctactaagtgtagatcaagggactcaacatcaaaggattaatttctactaagtgtagatttttttttgcggccgcaacagagaaactagacctgcaggaaggcgccggcgctctcttaaggtagc

SEQ ID NO: 731 - DNA, 15555 bp, synthetic construct
  source 1..15555: mol_type = other DNA
aaggatccctgaaagcgacgttggatgttaacatctacaaattgccttttcttatcgaccatgtacgtaagcgcttacgtttttggtggacccttgaggaaactggtagctgttgtgggcctgtggactcaagatggatcattaatttccaccttcacctacgatggggggcatcgcaccggtgagtaatattgtacggctaagagcgaatttggcctgtagacctcaattgcgagctttctaatttcaaactattcgggcctaacttttggtgtgatgatgctgactggcaggatatataccgttgtaatttgagctcgtgtgaataagtcgctgtgtatgtttgtttgattgtttctgttggagtgcagcccatttcaccggacaagtcggctagattgatttagccctgatgaactgccgaggggaagccatcttgagcgcggaatgggaatggatttcgttgtacaacgacacgacagaacacccacgggaccgagcttcgaagctttaacgcttgagttaagccgcgccgcgaagcggcgtcggcttgaacgaattgttagacatcagaagaactcgtcaagaaggcgatagaaggcgatgcgctgcgaatcgggagcggcgataccgtaaagcacgaggaagcggtcagcccattcgccgccaagctcttcagcaatatcacgggtagccaacgctatgtcctgatagcggtccgccacacccagccggccacagtcgatgaatccagaaaagcggccattttccaccatgatattcggcaagcaggcatcgccatgggtcacgacgagatcctcgccgtcgggcatgcgcgccttgagcctggcgaacagttcggctggcgcgagcccctgatgctcttcgtccagatcatcctgatcgacaagaccggcttccatccgagtacgtgctcgctcgatgcgatgtttcgcttggtggtcgaatgggcaggtagccggatcaagcgtatgcagccgccgcattgcatcagccatgatggatactttctcggcaggagcaaggtgagatgacaggagatcctgccccggcacttcgcccaatagcagccagtcccttcccgcttcagtgacaacgtcgagcacagctgcgcaaggaacgcccgtcgtggccagccacgatagccgcgctgcctcgtcctgcagttcattcagggcaccggacaggtcggtcttgacaaaaagaaccgggcgcccctgcgctgacagccggaacacggcggcatcagagcagccgattgtctgttgtgcccagtcatagccgaatagcctctccacccaagcggccggagaacctgcgtgcaatccatcttgttcaatcatggctttgtttctccttcaatcattgactattgtcacgttattctgaatcgacgagaactcacatcaatctcaacaagcatctctgctcgcgaaattggtgttgtctcattaaaacgtgaccgtcaaagtctattcactaggacccaaatctctccaggtcccgcaagctagcttcgccgcccacgtttctctttcttctcatattcaattgtcaaaaaacagacctcatgaccaaaatcccttaacgtgagttttcgttccactgagcgtcagaccccgtagaaaagatcaaaggatcttcttgagatcctttttttctgcgcgtaatctgctgcttgcaaacaaaaaaaccaccgctaccagcggtggtttgtttgccggatcaagagctaccaactttttttccgaaggtaactggcttcagcagagcgcagataccaaatactgtccttctagtgtagccgtagttaggccaccacttcaagaactctgtagcaccgcctacatacctcgctctgctaatcctgttaccagtggctgctgccagtggcgataagtcgtgtcttaccgggttggactcaagacgatagttaccggataaggcgcagcggtcgggctgaacggggggttcgtgcacacagcccagcttggagcgaacgacctacaccgaactgagatacctacagcgtgagctatgagaaagcgccacgcttcccgaagggagaaaggcggacaggtatccggtaagcggcagggtcggaacaggagagcgcacgagggagcttccagggggaaacgcctggtatctttatagtcctgtcgggtttcgccacctctgacttgagcgtcgatttttgtgatgctcgtcaggggggcggagcctatggaaaaacgccagcaacgcggcctttttacggttcctggccttttgctggccttttgctcacatgttctttcctgcgttatcccctgattctgtggataaccgtattaccgcctttgagtgagctgataccgctcgccgcagccgaacgaccgagcgcagcgagtcagtgagcgaggaagcggaagagcgcctgatgcggtattttctccttacgcatctgtgcggtatttcacaccgcatatggtgcactctcagtacaatctgctctgatgccgcatagttaagccagtatacaggctctccttcacgatcaacgatcggcatggggccttcgtgcttgttgagtaatgttatcgctcccatcagagcacgcttggtactccgggaatcggatggtctgtcgatcatccaaaaaacgctcatgttttcaacctattaggtctgtggtcagctgaccacagaccatcctgctccatactcgctaattctagccaaaccgcaacgtcccctgcccgctagccttcaagagcgccattatcatcgggccaagtgaaaacttcccgagctcgctccgccgtgtcagatctcggagatagcccccgggcgaattgatgaagttcgctcgctccaaaatgcacgccatcgctgctgccgcattctccggtcccattgcctcacacgcgtcttggtaagccgacgggctgacccccagcatagaccgaaccaccaccgcagccgacatgaggtcacgccagctagcaaccgcaccgctcggcccataattgccaatggtcgggcatgctttcaggatcatcccgagggggaacgcttttatcggctcgctccttgcccggtctatttcactcggcttagcgccctgctccttttcagagcgaggttcaagttcattaacggattcgggttttgaattctgtatgtgctgctcgctctgggcagcattggtgctattattttctgaattgtctctaatttccaaccggttgattatctcttcctggagcatccacatctcttcgagaattgactctacatcagcaagcgtcggggcgcgtggaattctacccacaagttccacatagacttcctcgacagcttgccagtcgccctccgctccctcttccatagctgccgtaattagcttccgaacgtcccgtcggcaaatcgtcagactttctttggccatcctgaatgctgctcgatcggccatcacttgctgtgccatcatcgctagctcttcggaccgcgcgagaagcggagacaaatcgaagccaaacgcgcgctcgatctgaccagcgccatccttacgagcgtaacgctttccgttggcgctatccttccggacgatcaagcctgactccacgagcatggcgatgtgcctacgcaaagtcgcgccagccatcccatgcgcccgaagggcaagctgagcattcgacgggaagacgatcagctgtgcctcctgacgcaactccgtttccgggtgaaagctcaatagcgcatcaaggacggcaagactgttggactggattccaagtagttccatggccgcggacgcatctctaaagaccttccacttgtccgctgtcttgccttgtttgatatcggccagcgccgtctggcgccgcacaagcgcaagcgtcattggccgccgcccgaatggcgtcgttacacttcctgtctgcatcatctttcacctttcagcaggcaaaggaaatcagctcaccaaaacggcgctaaaaactcttgacgaggattcgaggaaatgcgattctgttcgcgctagagagacagaagggcttccgcgacggcgacgttgagggggctcttttcttttgcggtttactctccccgtttccgttggttctcagcgtggtacgcttgatacagcgctggcacatgatcgagcacgaaggtcgcaaaatcgggcgtcgccttcctgtcaatcgtgatttccagtttggccttgctctgcgtcacctgtgcaattctggtgccgtctggggtggccatgacctcgggaagtccacgcgcaacccgactgggcttcagactagcgatcaccgccttgaatcgttctgccgatggcagcgcttgaacttcctccgacatagcatatttagccacgtcggccggtgaagaaactttctcaatcagctcggcaagttgttgccaactcggccgtccaacaccaggagcggcaccaatagcatcggtcagttcagaggggagggcgtcgacgagcagaagcatcttggacaaattgctcttgtcgatcgacatcgcggcgatgacaatctctcgagaaaactgcctgttcaggcgatgtgcgaagcgcgccttttcgatgaaggtaagatcttcgcgctcattgttttcctgaccctgtgctacgaccacttgctcgtccgtcagttcgcgaacgaccgctctgaccggaagtccgagttctgaaacggcgcgtagccggcggtggccgaaggcaacctgatatcggcccggctggctcggatgcggtcgcacaaggattgggacttgctgtccttgttcccggatcgaagtaaggagcccgtcaatgtcccctcgcatacgatcctgcacgaaagacggttctattgacgaggcatccaactctatcactgcctgaccttcagcgaggcgccgctcgatctcttcggcacggctaagacgatcgttttgctctcgcagtgcgttaccaatgttcgctgtgagcttcgttgccggatcgcgctccttccttgttacgccgaggagcggcatggagcggttctttgccgtcctattgtcggcgggcgacgtttcaggggcgtcagttgacacgccaaggatgtgcttccggctcatgtgggcctaccccatgcttttttgatcagtgtttcgatctcgtcgttgacggcgttcatcgcctccaaggctcgatcataggtcgagcgcgtgaacaggccacgctccacttcgaatagagtctggtttgtcaggccagcgtccgaaaccgcggtggttttaagcatcggaaaattgaggacattttcgccaaaaatcgaccgcagataacctaccatttggttctgtggtccgtcgctcggttcgaaacgggttatcagatagcgcatccaattaaacttgaacttggcgccagcattctcgatttcacgcaaaaggttcgatgtcattgccagaaactggttcatcgacatcacatccagcatctgcggatggaccgtgacaagaatggacgtcgccgcagtcaatgcggatagcgtgagatacccaagctggggagggcagtcgatgaccacgacgtcatagttatccgcgatatcttcaattacttggctgatgcgaccataaaagagcgtgtcgccctctttgcggttcatcagcgcgcgtggcgtatcgtgttcaaactccatcagctcaaggttaccaggaatcaggtggaggtcgggaatgtaagtccctcggacgactcgttcgattgccacttgctcatcatcataccttatagcgccgtagagcgtttcgttcgggccaacgtccgtttccggttggctcccaaagagtgcagaaaggctcgcttgaggatcgagatcaatggccaagactcgatatccgcgcatagcgaggtactgcgccagatgcgcggcggtggtggtcttacccgacccacctttgaaattcatcacagagataacctgaagctgctcgccgcctcgacgatgtggcaggtagcgccggttcccgcggccgacctgatccatatacttccgaatcacatggatatcttcaattgagaacattcgcctgccacccgggctcatgctaacattcaactctggcatctcagacgcggtctgccgtaaatatgactcgccaacgccgagcagcttggacgcctccgatggcccgaatgttcgaatgcccttctcggaatgcggcgggaaaaccttaagatgatgtgcttgaagttggctcgagagggcatcggcatgacgctccatcaaggccgtcaaccctacaactacaggcgctgcttttaggacagacttcgccatctcaaacccattccttgccagtggcgatatttttcgcgaaactggaaaagttccgccgctggcaattagcgccgattctgctgtttgggcaagagcttttaggttaacagaaggttaacgccctcaggtcgaaaaactccacccaactgttatttgtatttatttccaatgccttagagagattgccatttgaatatgttcatgtattgttttagtgataatcctacaatcgtaacccaaaaagaggtcgccctctgcgcgccgtcgtccaatataggcgaagtcacccttgcgactcaggcggattctaccttgtacacgtgtcgagtggaaaagtcccatgtggatcactccgttgccccgtcgctcaccgtgttggggggaaggtgcacatggctcagttctcaatggaaattatctgcctaaccggctcagttctgcgtagaaaccaacatgcaagctccaccgggtgcaaagcggcagcggcggcaggatatattcaattgtaaatggcttcatgtccgggaaatctacatggatcagcaatgagtatgatggtcaatatggagaaaaagaaagagtaattaccaattttttttcaattcaaaaatgtagatgtccgcagcgttattataaaatgaaagtacattttgataaaacgacaaattacgatccgtcgtatttataggcgaaagcaataaacaaattattctaattcggaaatctttatttcgacgtgtctacattcacgtccaaatgggggcttagatgagaaacttcacgatcgatgcggccctgccggcgcgccactagtcaacaattggccaatctttgttctaaattgctaataaacgaccatttccgtcaattctccttggttgcaacagtctacccgtcaaatgtttactaatttataagtgtgaagtttgaattatgaaagacgaaatcgtattaaaaattcacaagaataaacaactccatagattttcaaaaaaacagtcacgagaaaaaaaccacagtccgtttgtctgctcttctagtttttattatttttctattaatagttttttgttatttcgagaataaaatttgaacgatgtccgaaccacaaaagccgagccgataaatcctaagccgagcctaactttagccgtaaccatcagtcacggctcccgggctaattcatttgaaccgaatcataatcaacggtttagatcaaactcaaaacaatctaacggcaacatagacgcgtcggtgagctaaaaagagtgtgaaagccaggtcaccatagcattgtctctcccagattttttatttgggaaataatagaagaaatagaaaaaaataaaagagtgagaaaaatcgtagagctatatattcgcacatgtactcgtttcgctttccttagtgttagctgctgccgctgttgtttctcctccatttctctatctttctctctcgctgcttctcgaatcttctgtatcatcttcttcttcttcaaggtgagtctctagatccgttcgcttgattttgctgctcgttagtcgttattgttgattctctatgccgatttcgctagatctgtttagcatgcgttgtggttttatgagaaaatctttgttttgggggttgcttgttatgtgattcgatccgtgcttgttggatcgatctgagctaattcttaaggtttatgtgttagatctatggagtttgaggattcttctcgcttctgtcgatctctcgctgttatttttgtttttttcagtgaagtgaagttgtttagttcgaaatgacttcgtgtatgctcgattgatctggttttaatcttcgatctgttaggtgttgatgtttacaagtgaattctagtgttttctcgttgagatctgtgaagtttgaacctagttttctcaataatcaacatatgaagcgatgtttgagtttcaataaacgctgctaatcttcgaaactaagttgtgatctgattcgtgtttacttcatgagcttatccaattcatttcggtttcattttactttttttttagtgaaccatggcgcaagttagcagaatctgcaatggtgtgcagaacccatctcttatctccaatctctcgaaatccagtcaacgcaaatctcccttatcggtttctctgaagacgcagcagcatccacgagcttatccgatttcgtcgtcgtggggattgaagaagagtgggatgacgttaattggctctgagcttcgtcctcttaaggtcatgtcttctgtttccacggcgtgcatgggggaagcggtgatcgccgaagtatcgactcaactatcagaggtagttggcgtcatcgagcgccatctcgaaccgacgttgctggccgtacatttgtacggctccgcagtggatggcggcctgaagccacacagtgatattgatttgctggttacggtgaccgtaaggcttgatgaaacaacgcggcgagctttgatcaacgaccttttggaaacttcggcttcccctggagagagcgagattctccgcgctgtagaagtcaccattgttgtgcacgacgacatcattccgtggcgttatccagctaagcgcgaactgcaatttggagaatggcagcgcaatgacattcttgcaggtatcttcgagccagccacgatcgacattgatctggctatcttgctgacaaaagcaagagaacatagcgttgccttggtaggtccagcggcggaggaactctttgatccggttcctgaacaggatctatttgaggcgctaaatgaaaccttaacgctatggaactcgccgcccgactgggctggcgatgagcgaaatgtagtgcttacgttgtcccgcatttggtacagcgcagtaaccggcaaaatcgcgccgaaggatgtcgctgccgactgggcaatggagcgcctgccggcccagtatcagcccgtcatacttgaagctagacaggcttatcttggacaagaagaagatcgcttggcctcgcgcgcagatcagttggaagaatttgtccactacgtgaaaggcgagatcaccaaggtagtcggcaaataaggatcaattcccgatcgttcaaacatttggcaataaagtttcttaagattgaatcctgttgccggtcttgcgatgattatcatataatttctgttgaattacgttaagcatgtaataattaacatgtaatgcatgacgttatttatgagatgggtttttatgattagagtcccgcaattatacatttaatacgcgatagaaaacaaaatatagcgcgcaaactaggataaattatcgcgcgcggtgtcatctatgttactagatcacgcgtgtatgcaatatcctgcagggtattaattaattatgccctaagacatcctggaccaatatgctgaagattatgctacctacaccaggataggacttgaagcacttaaccttgaagattggttcgaagaaccagaacccgatccacctaaccctgtggaccgccagaggatagaggacatcctggacctactgaacgtcagcaatgacgactgaaagattcccaggacaccggcggaagtggtggacccagtctaggtgcgatgcttagtcgcgcacgatgactatgtcggaaggcatctttgctttcggcaaactttagtaatactttaaggaaagtattgtacaagttaggtgcagagacaataatgcacccagctttagctttgtttatggaattattgtgtcggttgcattattggatgcctgcgtgcaccctaagcaatcaacggagaaacaaagataaaaatcaattactcacatgaaagagtattgatcacgagtcactatggagcgacaatctccagacaggatgtcagcatcttatcttcctttgaagaaagcatcatcaataacgatgtaatggtggggacatccactaagttattgctctgcaaacagctcaaaaagctactggccgacaatcataattgctcggcatgtccaggtggggcctccactagcaataatacaagctttacagcttgcagtgactcatcctccaataatggagaaaaagacgtcagcagtgacgaacaagggtcgaaagacttgcctatataagggcattctcccctcagttgaagatcatcgaaagttggagcaataaactctctcttcaacaaatctatcttttatcttttatcgccgcaatggcgggatctaagaagagaagaattaaacaagataaagacaagttcaagctgtacttccagaacccgcaatttatggggggctgggacaaggataaagagacagactaccgcgcgacaattctccgctatggctccaaatactatctggccatcatggacaagaagtacgcgaagtgcctgcagaagatcgacaaagacgacgtcaatggcaactatgaaaagatcaactacaagctgctgccgggcccgaacaagatgctcccgaaggtgttcttcagcaagaagtggatggcctactacaatccaagcgaggatattcagaaaatctataaaaacgggaccttcaagaagggggacatgtttaacctcaacgactgccacaagctcattgatttcttcaaggatagcatttcccgctacccgaaatggtccaatgcgtacgattttaacttctccgagacagaaaagtacaaagacatcgcgggcttttacagggaggtggaggagcaagggtataaagtttcttttgaatccgcgagcaagaaggaagtcgacaagctcgtcgaggagggcaagctctacatgttccaaatttataacaaggacttttccgacaagagccatgggaccccaaacctccacaccatgtacttcaaactgctctttgacgagaacaaccacgggcaaatcaggctgagcggcggcgccgaattattcatgcgcagggcctccctcaagaaggaagagctggtcgtccatccagccaattccccgatcgcgaacaagaacccggacaatccgaaaaagaccaccaccctgtcctacgacgtctacaaggacaaacgcttcagcgaagaccagtacgaattacacatcccaattgcgattaataagtgcccaaagaatatcttcaaaattaatacagaggtcagggtgctgctcaaacacgacgacaatccgtatgtcatcggcattgacaggggcgagcgcaatctgctctatatcgtggtcgtggatgggaagggcaatattgtggagcagtactccctgaacgagattatcaacaacttcaatgggattaggattaagaccgactatcacagcctgctcgacaagaaagaaaaagagaggtttgaggcccgccaaaactggacctccattgagaatatcaaagaattaaaggccggctatatttcccaagtcgtccacaagatctgcgagctggtggagaaatatgacgccgtgattgcgctcgaagacttaaattctgggttcaagaactcccgcgtgaaggtggaaaaacaggtgtatcagaaattcgagaaaatgctgatcgacaaactcaattatatggtggataagaagtccaacccgtgtgccacagggggcgcgctgaagggctatcagatcaccaacaagttcgagagcttcaagagcatgagcacccagaacgggtttattttctacatcccggcgtggctcacctccaagattgacccgagcaccggcttcgtgaacctcctgaagacaaagtatacctccattgccgacagcaagaagtttatctcctccttcgaccgcattatgtatgtgccggaggaggacctcttcgagttcgccctcgactacaaaaacttcagccgcacagatgcggattacatcaagaagtggaagctgtactcctacgggaacaggatccgcatcttcaggaatccaaaaaaaaataacgtctttgactgggaggaagtgtgcctgacatccgcctacaaggaactgttcaataaatacggcatcaattaccagcagggcgacattcgcgccctcctctgtgagcagtccgacaaagcgttttactccagcttcatggccctcatgtccctgatgctccaaatgaggaatagcatcacagggcgcaccgacgtcgacttcctcatcagcccggtgaagaactccgacgggatcttttacgactcccgcaactatgaggcgcaagagaatgcgatcctcccgaagaacgccgatgcgaacggggcctataatatcgccaggaaagtgctctgggccatcgggcagttcaaaaaggcggaggatgagaagctcgacaaggtgaaaattgccatttccaacaaggagtggctggagtacgcgcagacctccgtgaagcacggctcctctggcagctccggctctagcggctcctctggcagctccggctccaagctggagaagtttacaaactgttacagcctctccaaaaccctcaggtttaaagcgatcccggtgggcaagacccaggagaacatcgacaacaagaggctcctggtggaagacgagaagcgcgccgaagactacaagggcgtgaagaagctgctcgataggtactacctcagctttattaacgacgtgctgcacagcatcaaactcaagaatctcaacaactacatctccctcttccgcaaaaagacccgcaccgagaaggagaacaaggagctggagaacctggagatcaacctccgcaaggaaatcgccaaagcgttcaagggcaatgaagggtacaagagcctcttcaagaaagacatcatcgaaactatcctcccagagtttctcgatgacaaggacgagatcgcgctggtgaactcctttaacgggttcacaaccgcgtttaccggcttctttgataacagggaaaatatgttctccgaggaggccaagtccaccagcatcgccttcaggtgtatcaacgagaacctcacccgctacatttccaatatggacattttcgagaaggtggatgcgatcttcgataagcacgaggtgcaggagatcaaagagaagattctcaattccgattatgacgtcgaggatttcttcgaaggggagttctttaattttgtgctcacacaagagggcattgacgtgtacaacgcgattatcgggggcttcgtcacagagtccggggagaagattaaggggctgaatgagtacatcaatctgtacaatcagaagaccaagcagaaactgccgaaattcaagccgctctacaagcaagtcctgtccgatagggaaagcctctccttctacggcgagggctataccagcgacgaggaggtgctggaagtcttccgcaacacactgaataagaatagcgagattttctcctccatcaagaagctcgagaagctctttaagaactttgacgagtacagctccgccgggattttcgtgaagaacgggccggcgatcagcaccatctccaaggacatctttggcgagtggaacgtcatcagggacaagtggaacgccgagtacgacgacatccacctgaagaagaaggcggtggtgaccgagaagtatgaggacgatcgcaggaagtccttcaaaaaaatcggctccttcagcctcgaacagctccaggagtatgccgatgcggatctgtccgtcgtcgagaagctgaaggaaatcatcattcagaaggtcgacgagatctataaagtgtacgggtccagcgagaagctgttcgacgccgactttgtgctcgagaagtccctcaaaaagaatgacgccgtggtggccattatgaaagacctgctcgactccgtgaagtccttcgaaaattacattaaagcgttctttggggaggggaaggaaactaacagggatgagtccttctatggcgactttgtcctcgcgtacgacatcctgctgaaggtcgaccacatttacgacgcgatccgcaactacgtgacacagaagccgtactccggatctaagaagagaagaattaaacaagattgatagaagggctctctgtcatgatttcatactttcattattgagctctgtaattacaattatgaccatgagaacatctcttattgtgtggccttttaattgctgatgttagtactgaaccaaagcttatcgtgatgatgtaaaagcaataagtacttgtttgtagcttctttgtgtctccctttgggcttaatacatctgtttagtgttgtggctttggcatagacttctcttggtaataatgccttgcaatgcaaaatttcaattatcaaattctattatgttctcaccttatggtaacagcttaccctgtggaagatgagattcttgagttgagtcattgccaatttttggcattagcttttgaattagtgaattttgacaaaaattaccgtgacactgattttgttgaagctcttaagtgtagtttttacaaaatttcagtggctcgttgtgattatgtcaaactcacggcgaatgtagttcttacagaatttcagtggctcaaggatttaacgcgtgtatgcggccgcaaactatttaaatgcaggcgataaaaatgttttaaacgatatatattataaaaaaaaacgtttcaaaaataaatacaaaaatgtttttaaatatatataatttaactcattaaagaaaataaaaatgcaagtgcggtgacaagacaagctaaaagttgcaaaagaaatggcagggctataaggctcacctactcctggatttaccaaattttggttcgtccctatactcgaaaaataaaacaaaataaatttcagtatcttcgtttttgtatgctttgactgtgaggcgaggccaactttcttcttctgtctgagatgaattttgtttgcctcctgtgaaggatgtatcattcaaagtgaatgttttgcaactgccagtagtcccacatcgaccaaatattcttattacagtgtgtttatatagcacctggagaaggaatgggttgtttcaaagattaaataatttctactaagtgtagatcaagggactcaacatcaaaggattaatttctactaagtgtagatcaagggactcaacatcaaaggattaatttctactaagtgtagatcaagggactcaacatcaaaggattaatttctactaagtgtagatttttttttgcggccgcaacagagaaactagacctgcaggaaggcgccggcgctctcttaaggtagc

SEQ ID NO: 732 - DNA, 15555 bp, synthetic construct
  source 1..15555: mol_type = other DNA
aaggatccctgaaagcgacgttggatgttaacatctacaaattgccttttcttatcgaccatgtacgtaagcgcttacgtttttggtggacccttgaggaaactggtagctgttgtgggcctgtggactcaagatggatcattaatttccaccttcacctacgatggggggcatcgcaccggtgagtaatattgtacggctaagagcgaatttggcctgtagacctcaattgcgagctttctaatttcaaactattcgggcctaacttttggtgtgatgatgctgactggcaggatatataccgttgtaatttgagctcgtgtgaataagtcgctgtgtatgtttgtttgattgtttctgttggagtgcagcccatttcaccggacaagtcggctagattgatttagccctgatgaactgccgaggggaagccatcttgagcgcggaatgggaatggatttcgttgtacaacgacacgacagaacacccacgggaccgagcttcgaagctttaacgcttgagttaagccgcgccgcgaagcggcgtcggcttgaacgaattgttagacatcagaagaactcgtcaagaaggcgatagaaggcgatgcgctgcgaatcgggagcggcgataccgtaaagcacgaggaagcggtcagcccattcgccgccaagctcttcagcaatatcacgggtagccaacgctatgtcctgatagcggtccgccacacccagccggccacagtcgatgaatccagaaaagcggccattttccaccatgatattcggcaagcaggcatcgccatgggtcacgacgagatcctcgccgtcgggcatgcgcgccttgagcctggcgaacagttcggctggcgcgagcccctgatgctcttcgtccagatcatcctgatcgacaagaccggcttccatccgagtacgtgctcgctcgatgcgatgtttcgcttggtggtcgaatgggcaggtagccggatcaagcgtatgcagccgccgcattgcatcagccatgatggatactttctcggcaggagcaaggtgagatgacaggagatcctgccccggcacttcgcccaatagcagccagtcccttcccgcttcagtgacaacgtcgagcacagctgcgcaaggaacgcccgtcgtggccagccacgatagccgcgctgcctcgtcctgcagttcattcagggcaccggacaggtcggtcttgacaaaaagaaccgggcgcccctgcgctgacagccggaacacggcggcatcagagcagccgattgtctgttgtgcccagtcatagccgaatagcctctccacccaagcggccggagaacctgcgtgcaatccatcttgttcaatcatggctttgtttctccttcaatcattgactattgtcacgttattctgaatcgacgagaactcacatcaatctcaacaagcatctctgctcgcgaaattggtgttgtctcattaaaacgtgaccgtcaaagtctattcactaggacccaaatctctccaggtcccgcaagctagcttcgccgcccacgtttctctttcttctcatattcaattgtcaaaaaacagacctcatgaccaaaatcccttaacgtgagttttcgttccactgagcgtcagaccccgtagaaaagatcaaaggatcttcttgagatcctttttttctgcgcgtaatctgctgcttgcaaacaaaaaaaccaccgctaccagcggtggtttgtttgccggatcaagagctaccaactttttttccgaaggtaactggcttcagcagagcgcagataccaaatactgtccttctagtgtagccgtagttaggccaccacttcaagaactctgtagcaccgcctacatacctcgctctgctaatcctgttaccagtggctgctgccagtggcgataagtcgtgtcttaccgggttggactcaagacgatagttaccggataaggcgcagcggtcgggctgaacggggggttcgtgcacacagcccagcttggagcgaacgacctacaccgaactgagatacctacagcgtgagctatgagaaagcgccacgcttcccgaagggagaaaggcggacaggtatccggtaagcggcagggtcggaacaggagagcgcacgagggagcttccagggggaaacgcctggtatctttatagtcctgtcgggtttcgccacctctgacttgagcgtcgatttttgtgatgctcgtcaggggggcggagcctatggaaaaacgccagcaacgcggcctttttacggttcctggccttttgctggccttttgctcacatgttctttcctgcgttatcccctgattctgtggataaccgtattaccgcctttgagtgagctgataccgctcgccgcagccgaacgaccgagcgcagcgagtcagtgagcgaggaagcggaagagcgcctgatgcggtattttctccttacgcatctgtgcggtatttcacaccgcatatggtgcactctcagtacaatctgctctgatgccgcatagttaagccagtatacaggctctccttcacgatcaacgatcggcatggggccttcgtgcttgttgagtaatgttatcgctcccatcagagcacgcttggtactccgggaatcggatggtctgtcgatcatccaaaaaacgctcatgttttcaacctattaggtctgtggtcagctgaccacagaccatcctgctccatactcgctaattctagccaaaccgcaacgtcccctgcccgctagccttcaagagcgccattatcatcgggccaagtgaaaacttcccgagctcgctccgccgtgtcagatctcggagatagcccccgggcgaattgatgaagttcgctcgctccaaaatgcacgccatcgctgctgccgcattctccggtcccattgcctcacacgcgtcttggtaagccgacgggctgacccccagcatagaccgaaccaccaccgcagccgacatgaggtcacgccagctagcaaccgcaccgctcggcccataattgccaatggtcgggcatgctttcaggatcatcccgagggggaacgcttttatcggctcgctccttgcccggtctatttcactcggcttagcgccctgctccttttcagagcgaggttcaagttcattaacggattcgggttttgaattctgtatgtgctgctcgctctgggcagcattggtgctattattttctgaattgtctctaatttccaaccggttgattatctcttcctggagcatccacatctcttcgagaattgactctacatcagcaagcgtcggggcgcgtggaattctacccacaagttccacatagacttcctcgacagcttgccagtcgccctccgctccctcttccatagctgccgtaattagcttccgaacgtcccgtcggcaaatcgtcagactttctttggccatcctgaatgctgctcgatcggccatcacttgctgtgccatcatcgctagctcttcggaccgcgcgagaagcggagacaaatcgaagccaaacgcgcgctcgatctgaccagcgccatccttacgagcgtaacgctttccgttggcgctatccttccggacgatcaagcctgactccacgagcatggcgatgtgcctacgcaaagtcgcgccagccatcccatgcgcccgaagggcaagctgagcattcgacgggaagacgatcagctgtgcctcctgacgcaactccgtttccgggtgaaagctcaatagcgcatcaaggacggcaagactgttggactggattccaagtagttccatggccgcggacgcatctctaaagaccttccacttgtccgctgtcttgccttgtttgatatcggccagcgccgtctggcgccgcacaagcgcaagcgtcattggccgccgcccgaatggcgtcgttacacttcctgtctgcatcatctttcacctttcagcaggcaaaggaaatcagctcaccaaaacggcgctaaaaactcttgacgaggattcgaggaaatgcgattctgttcgcgctagagagacagaagggcttccgcgacggcgacgttgagggggctcttttcttttgcggtttactctccccgtttccgttggttctcagcgtggtacgcttgatacagcgctggcacatgatcgagcacgaaggtcgcaaaatcgggcgtcgccttcctgtcaatcgtgatttccagtttggccttgctctgcgtcacctgtgcaattctggtgccgtctggggtggccatgacctcgggaagtccacgcgcaacccgactgggcttcagactagcgatcaccgccttgaatcgttctgccgatggcagcgcttgaacttcctccgacatagcatatttagccacgtcggccggtgaagaaactttctcaatcagctcggcaagttgttgccaactcggccgtccaacaccaggagcggcaccaatagcatcggtcagttcagaggggagggcgtcgacgagcagaagcatcttggacaaattgctcttgtcgatcgacatcgcggcgatgacaatctctcgagaaaactgcctgttcaggcgatgtgcgaagcgcgccttttcgatgaaggtaagatcttcgcgctcattgttttcctgaccctgtgctacgaccacttgctcgtccgtcagttcgcgaacgaccgctctgaccggaagtccgagttctgaaacggcgcgtagccggcggtggccgaaggcaacctgatatcggcccggctggctcggatgcggtcgcacaaggattgggacttgctgtccttgttcccggatcgaagtaaggagcccgtcaatgtcccctcgcatacgatcctgcacgaaagacggttctattgacgaggcatccaactctatcactgcctgaccttcagcgaggcgccgctcgatctcttcggcacggctaagacgatcgttttgctctcgcagtgcgttaccaatgttcgctgtgagcttcgttgccggatcgcgctccttccttgttacgccgaggagcggcatggagcggttctttgccgtcctattgtcggcgggcgacgtttcaggggcgtcagttgacacgccaaggatgtgcttccggctcatgtgggcctaccccatgcttttttgatcagtgtttcgatctcgtcgttgacggcgttcatcgcctccaaggctcgatcataggtcgagcgcgtgaacaggccacgctccacttcgaatagagtctggtttgtcaggccagcgtccgaaaccgcggtggttttaagcatcggaaaattgaggacattttcgccaaaaatcgaccgcagataacctaccatttggttctgtggtccgtcgctcggttcgaaacgggttatcagatagcgcatccaattaaacttgaacttggcgccagcattctcgatttcacgcaaaaggttcgatgtcattgccagaaactggttcatcgacatcacatccagcatctgcggatggaccgtgacaagaatggacgtcgccgcagtcaatgcggatagcgtgagatacccaagctggggagggcagtcgatgaccacgacgtcatagttatccgcgatatcttcaattacttggctgatgcgaccataaaagagcgtgtcgccctctttgcggttcatcagcgcgcgtggcgtatcgtgttcaaactccatcagctcaaggttaccaggaatcaggtggaggtcgggaatgtaagtccctcggacgactcgttcgattgccacttgctcatcatcataccttatagcgccgtagagcgtttcgttcgggccaacgtccgtttccggttggctcccaaagagtgcagaaaggctcgcttgaggatcgagatcaatggccaagactcgatatccgcgcatagcgaggtactgcgccagatgcgcggcggtggtggtcttacccgacccacctttgaaattcatcacagagataacctgaagctgctcgccgcctcgacgatgtggcaggtagcgccggttcccgcggccgacctgatccatatacttccgaatcacatggatatcttcaattgagaacattcgcctgccacccgggctcatgctaacattcaactctggcatctcagacgcggtctgccgtaaatatgactcgccaacgccgagcagcttggacgcctccgatggcccgaatgttcgaatgcccttctcggaatgcggcgggaaaaccttaagatgatgtgcttgaagttggctcgagagggcatcggcatgacgctccatcaaggccgtcaaccctacaactacaggcgctgcttttaggacagacttcgccatctcaaacccattccttgccagtggcgatatttttcgcgaaactggaaaagttccgccgctggcaattagcgccgattctgctgtttgggcaagagcttttaggttaacagaaggttaacgccctcaggtcgaaaaactccacccaactgttatttgtatttatttccaatgccttagagagattgccatttgaatatgttcatgtattgttttagtgataatcctacaatcgtaacccaaaaagaggtcgccctctgcgcgccgtcgtccaatataggcgaagtcacccttgcgactcaggcggattctaccttgtacacgtgtcgagtggaaaagtcccatgtggatcactccgttgccccgtcgctcaccgtgttggggggaaggtgcacatggctcagttctcaatggaaattatctgcctaaccggctcagttctgcgtagaaaccaacatgcaagctccaccgggtgcaaagcggcagcggcggcaggatatattcaattgtaaatggcttcatgtccgggaaatctacatggatcagcaatgagtatgatggtcaatatggagaaaaagaaagagtaattaccaattttttttcaattcaaaaatgtagatgtccgcagcgttattataaaatgaaagtacattttgataaaacgacaaattacgatccgtcgtatttataggcgaaagcaataaacaaattattctaattcggaaatctttatttcgacgtgtctacattcacgtccaaatgggggcttagatgagaaacttcacgatcgatgcggccctgccggcgcgccactagtcaacaattggccaatctttgttctaaattgctaataaacgaccatttccgtcaattctccttggttgcaacagtctacccgtcaaatgtttactaatttataagtgtgaagtttgaattatgaaagacgaaatcgtattaaaaattcacaagaataaacaactccatagattttcaaaaaaacagtcacgagaaaaaaaccacagtccgtttgtctgctcttctagtttttattatttttctattaatagttttttgttatttcgagaataaaatttgaacgatgtccgaaccacaaaagccgagccgataaatcctaagccgagcctaactttagccgtaaccatcagtcacggctcccgggctaattcatttgaaccgaatcataatcaacggtttagatcaaactcaaaacaatctaacggcaacatagacgcgtcggtgagctaaaaagagtgtgaaagccaggtcaccatagcattgtctctcccagattttttatttgggaaataatagaagaaatagaaaaaaataaaagagtgagaaaaatcgtagagctatatattcgcacatgtactcgtttcgctttccttagtgttagctgctgccgctgttgtttctcctccatttctctatctttctctctcgctgcttctcgaatcttctgtatcatcttcttcttcttcaaggtgagtctctagatccgttcgcttgattttgctgctcgttagtcgttattgttgattctctatgccgatttcgctagatctgtttagcatgcgttgtggttttatgagaaaatctttgttttgggggttgcttgttatgtgattcgatccgtgcttgttggatcgatctgagctaattcttaaggtttatgtgttagatctatggagtttgaggattcttctcgcttctgtcgatctctcgctgttatttttgtttttttcagtgaagtgaagttgtttagttcgaaatgacttcgtgtatgctcgattgatctggttttaatcttcgatctgttaggtgttgatgtttacaagtgaattctagtgttttctcgttgagatctgtgaagtttgaacctagttttctcaataatcaacatatgaagcgatgtttgagtttcaataaacgctgctaatcttcgaaactaagttgtgatctgattcgtgtttacttcatgagcttatccaattcatttcggtttcattttactttttttttagtgaaccatggcgcaagttagcagaatctgcaatggtgtgcagaacccatctcttatctccaatctctcgaaatccagtcaacgcaaatctcccttatcggtttctctgaagacgcagcagcatccacgagcttatccgatttcgtcgtcgtggggattgaagaagagtgggatgacgttaattggctctgagcttcgtcctcttaaggtcatgtcttctgtttccacggcgtgcatgggggaagcggtgatcgccgaagtatcgactcaactatcagaggtagttggcgtcatcgagcgccatctcgaaccgacgttgctggccgtacatttgtacggctccgcagtggatggcggcctgaagccacacagtgatattgatttgctggttacggtgaccgtaaggcttgatgaaacaacgcggcgagctttgatcaacgaccttttggaaacttcggcttcccctggagagagcgagattctccgcgctgtagaagtcaccattgttgtgcacgacgacatcattccgtggcgttatccagctaagcgcgaactgcaatttggagaatggcagcgcaatgacattcttgcaggtatcttcgagccagccacgatcgacattgatctggctatcttgctgacaaaagcaagagaacatagcgttgccttggtaggtccagcggcggaggaactctttgatccggttcctgaacaggatctatttgaggcgctaaatgaaaccttaacgctatggaactcgccgcccgactgggctggcgatgagcgaaatgtagtgcttacgttgtcccgcatttggtacagcgcagtaaccggcaaaatcgcgccgaaggatgtcgctgccgactgggcaatggagcgcctgccggcccagtatcagcccgtcatacttgaagctagacaggcttatcttggacaagaagaagatcgcttggcctcgcgcgcagatcagttggaagaatttgtccactacgtgaaaggcgagatcaccaaggtagtcggcaaataaggatcaattcccgatcgttcaaacatttggcaataaagtttcttaagattgaatcctgttgccggtcttgcgatgattatcatataatttctgttgaattacgttaagcatgtaataattaacatgtaatgcatgacgttatttatgagatgggtttttatgattagagtcccgcaattatacatttaatacgcgatagaaaacaaaatatagcgcgcaaactaggataaattatcgcgcgcggtgtcatctatgttactagatcacgcgtgtatgcaatatcctgcagggtattaattaattatgccctaagacatcctggaccaatatgctgaagattatgctacctacaccaggataggacttgaagcacttaaccttgaagattggttcgaagaaccagaacccgatccacctaaccctgtggaccgccagaggatagaggacatcctggacctactgaacgtcagcaatgacgactgaaagattcccaggacaccggcggaagtggtggacccagtctaggtgcgatgcttagtcgcgcacgatgactatgtcggaaggcatctttgctttcggcaaactttagtaatactttaaggaaagtattgtacaagttaggtgcagagacaataatgcacccagctttagctttgtttatggaattattgtgtcggttgcattattggatgcctgcgtgcaccctaagcaatcaacggagaaacaaagataaaaatcaattactcacatgaaagagtattgatcacgagtcactatggagcgacaatctccagacaggatgtcagcatcttatcttcctttgaagaaagcatcatcaataacgatgtaatggtggggacatccactaagttattgctctgcaaacagctcaaaaagctactggccgacaatcataattgctcggcatgtccaggtggggcctccactagcaataatacaagctttacagcttgcagtgactcatcctccaataatggagaaaaagacgtcagcagtgacgaacaagggtcgaaagacttgcctatataagggcattctcccctcagttgaagatcatcgaaagttggagcaataaactctctcttcaacaaatctatcttttatcttttatcgccgcaatggcgggatctaagaagagaagaattaaacaagataagtccctcaaaaagaatgacgccgtggtggccattatgaaagacctgctcgactccgtgaagtccttcgaaaattacattaaagcgttctttggggaggggaaggaaactaacagggatgagtccttctatggcgactttgtcctcgcgtacgacatcctgctgaaggtcgaccacatttacgacgcgatccgcaactacgtgacacagaagccgtactccaaagacaagttcaagctgtacttccagaacccgcaatttatggggggctgggacaaggataaagagacagactaccgcgcgacaattctccgctatggctccaaatactatctggccatcatggacaagaagtacgcgaagtgcctgcagaagatcgacaaagacgacgtcaatggcaactatgaaaagatcaactacaagctgctgccgggcccgaacaagatgctcccgaaggtgttcttcagcaagaagtggatggcctactacaatccaagcgaggatattcagaaaatctataaaaacgggaccttcaagaagggggacatgtttaacctcaacgactgccacaagctcattgatttcttcaaggatagcatttcccgctacccgaaatggtccaatgcgtacgattttaacttctccgagacagaaaagtacaaagacatcgcgggcttttacagggaggtggaggagcaagggtataaagtttcttttgaatccgcgagcaagaaggaagtcgacaagctcgtcgaggagggcaagctctacatgttccaaatttataacaaggacttttccgacaagagccatgggaccccaaacctccacaccatgtacttcaaactgctctttgacgagaacaaccacgggcaaatcaggctgagcggcggcgccgaattattcatgcgcagggcctccctcaagaaggaagagctggtcgtccatccagccaattccccgatcgcgaacaagaacccggacaatccgaaaaagaccaccaccctgtcctacgacgtctacaaggacaaacgcttcagcgaagaccagtacgaattacacatcccaattgcgattaataagtgcccaaagaatatcttcaaaattaatacagaggtcagggtgctgctcaaacacgacgacaatccgtatgtcatcggcattgacaggggcgagcgcaatctgctctatatcgtggtcgtggatgggaagggcaatattgtggagcagtactccctgaacgagattatcaacaacttcaatgggattaggattaagaccgactatcacagcctgctcgacaagaaagaaaaagagaggtttgaggcccgccaaaactggacctccattgagaatatcaaagaattaaaggccggctatatttcccaagtcgtccacaagatctgcgagctggtggagaaatatgacgccgtgattgcgctcgaagacttaaattctgggttcaagaactcccgcgtgaaggtggaaaaacaggtgtatcagaaattcgagaaaatgctgatcgacaaactcaattatatggtggataagaagtccaacccgtgtgccacagggggcgcgctgaagggctatcagatcaccaacaagttcgagagcttcaagagcatgagcacccagaacgggtttattttctacatcccggcgtggctcacctccaagattgacccgagcaccggcttcgtgaacctcctgaagacaaagtatacctccattgccgacagcaagaagtttatctcctccttcgaccgcattatgtatgtgccggaggaggacctcttcgagttcgccctcgactacaaaaacttcagccgcacagatgcggattacatcaagaagtggaagctgtactcctacgggaacaggatccgcatcttcaggaatccaaaaaaaaataacgtctttgactgggaggaagtgtgcctgacatccgcctacaaggaactgttcaataaatacggcatcaattaccagcagggcgacattcgcgccctcctctgtgagcagtccgacaaagcgttttactccagcttcatggccctcatgtccctgatgctccaaatgaggaatagcatcacagggcgcaccgacgtcgacttcctcatcagcccggtgaagaactccgacgggatcttttacgactcccgcaactatgaggcgcaagagaatgcgatcctcccgaagaacgccgatgcgaacggggcctataatatcgccaggaaagtgctctgggccatcgggcagttcaaaaaggcggaggatgagaagctcgacaaggtgaaaattgccatttccaacaaggagtggctggagtacgcgcagacctccgtgaagcacggctcctctggcagctccggctctagcggctcctctggcagctccggctccaagctggagaagtttacaaactgttacagcctctccaaaaccctcaggtttaaagcgatcccggtgggcaagacccaggagaacatcgacaacaagaggctcctggtggaagacgagaagcgcgccgaagactacaagggcgtgaagaagctgctcgataggtactacctcagctttattaacgacgtgctgcacagcatcaaactcaagaatctcaacaactacatctccctcttccgcaaaaagacccgcaccgagaaggagaacaaggagctggagaacctggagatcaacctccgcaaggaaatcgccaaagcgttcaagggcaatgaagggtacaagagcctcttcaagaaagacatcatcgaaactatcctcccagagtttctcgatgacaaggacgagatcgcgctggtgaactcctttaacgggttcacaaccgcgtttaccggcttctttgataacagggaaaatatgttctccgaggaggccaagtccaccagcatcgccttcaggtgtatcaacgagaacctcacccgctacatttccaatatggacattttcgagaaggtggatgcgatcttcgataagcacgaggtgcaggagatcaaagagaagattctcaattccgattatgacgtcgaggatttcttcgaaggggagttctttaattttgtgctcacacaagagggcattgacgtgtacaacgcgattatcgggggcttcgtcacagagtccggggagaagattaaggggctgaatgagtacatcaatctgtacaatcagaagaccaagcagaaactgccgaaattcaagccgctctacaagcaagtcctgtccgatagggaaagcctctccttctacggcgagggctataccagcgacgaggaggtgctggaagtcttccgcaacacactgaataagaatagcgagattttctcctccatcaagaagctcgagaagctctttaagaactttgacgagtacagctccgccgggattttcgtgaagaacgggccggcgatcagcaccatctccaaggacatctttggcgagtggaacgtcatcagggacaagtggaacgccgagtacgacgacatccacctgaagaagaaggcggtggtgaccgagaagtatgaggacgatcgcaggaagtccttcaaaaaaatcggctccttcagcctcgaacagctccaggagtatgccgatgcggatctgtccgtcgtcgagaagctgaaggaaatcatcattcagaaggtcgacgagatctataaagtgtacgggtccagcgagaagctgttcgacgccgactttgtgctcgagggatctaagaagagaagaattaaacaagattgatagaagggctctctgtcatgatttcatactttcattattgagctctgtaattacaattatgaccatgagaacatctcttattgtgtggccttttaattgctgatgttagtactgaaccaaagcttatcgtgatgatgtaaaagcaataagtacttgtttgtagcttctttgtgtctccctttgggcttaatacatctgtttagtgttgtggctttggcatagacttctcttggtaataatgccttgcaatgcaaaatttcaattatcaaattctattatgttctcaccttatggtaacagcttaccctgtggaagatgagattcttgagttgagtcattgccaatttttggcattagcttttgaattagtgaattttgacaaaaattaccgtgacactgattttgttgaagctcttaagtgtagtttttacaaaatttcagtggctcgttgtgattatgtcaaactcacggcgaatgtagttcttacagaatttcagtggctcaaggatttaacgcgtgtatgcggccgcaaactatttaaatgcaggcgataaaaatgttttaaacgatatatattataaaaaaaaacgtttcaaaaataaatacaaaaatgtttttaaatatatataatttaactcattaaagaaaataaaaatgcaagtgcggtgacaagacaagctaaaagttgcaaaagaaatggcagggctataaggctcacctactcctggatttaccaaattttggttcgtccctatactcgaaaaataaaacaaaataaatttcagtatcttcgtttttgtatgctttgactgtgaggcgaggccaactttcttcttctgtctgagatgaattttgtttgcctcctgtgaaggatgtatcattcaaagtgaatgttttgcaactgccagtagtcccacatcgaccaaatattcttattacagtgtgtttatatagcacctggagaaggaatgggttgtttcaaagattaaataatttctactaagtgtagatcaagggactcaacatcaaaggattaatttctactaagtgtagatcaagggactcaacatcaaaggattaatttctactaagtgtagatcaagggactcaacatcaaaggattaatttctactaagtgtagatttttttttgcggccgcaacagagaaactagacctgcaggaaggcgccggcgctctcttaaggtagc

SEQ ID NO: 733 - DNA, 15555 bp, synthetic construct
  source 1..15555: mol_type = other DNA
aaggatccctgaaagcgacgttggatgttaacatctacaaattgccttttcttatcgaccatgtacgtaagcgcttacgtttttggtggacccttgaggaaactggtagctgttgtgggcctgtggactcaagatggatcattaatttccaccttcacctacgatggggggcatcgcaccggtgagtaatattgtacggctaagagcgaatttggcctgtagacctcaattgcgagctttctaatttcaaactattcgggcctaacttttggtgtgatgatgctgactggcaggatatataccgttgtaatttgagctcgtgtgaataagtcgctgtgtatgtttgtttgattgtttctgttggagtgcagcccatttcaccggacaagtcggctagattgatttagccctgatgaactgccgaggggaagccatcttgagcgcggaatgggaatggatttcgttgtacaacgacacgacagaacacccacgggaccgagcttcgaagctttaacgcttgagttaagccgcgccgcgaagcggcgtcggcttgaacgaattgttagacatcagaagaactcgtcaagaaggcgatagaaggcgatgcgctgcgaatcgggagcggcgataccgtaaagcacgaggaagcggtcagcccattcgccgccaagctcttcagcaatatcacgggtagccaacgctatgtcctgatagcggtccgccacacccagccggccacagtcgatgaatccagaaaagcggccattttccaccatgatattcggcaagcaggcatcgccatgggtcacgacgagatcctcgccgtcgggcatgcgcgccttgagcctggcgaacagttcggctggcgcgagcccctgatgctcttcgtccagatcatcctgatcgacaagaccggcttccatccgagtacgtgctcgctcgatgcgatgtttcgcttggtggtcgaatgggcaggtagccggatcaagcgtatgcagccgccgcattgcatcagccatgatggatactttctcggcaggagcaaggtgagatgacaggagatcctgccccggcacttcgcccaatagcagccagtcccttcccgcttcagtgacaacgtcgagcacagctgcgcaaggaacgcccgtcgtggccagccacgatagccgcgctgcctcgtcctgcagttcattcagggcaccggacaggtcggtcttgacaaaaagaaccgggcgcccctgcgctgacagccggaacacggcggcatcagagcagccgattgtctgttgtgcccagtcatagccgaatagcctctccacccaagcggccggagaacctgcgtgcaatccatcttgttcaatcatggctttgtttctccttcaatcattgactattgtcacgttattctgaatcgacgagaactcacatcaatctcaacaagcatctctgctcgcgaaattggtgttgtctcattaaaacgtgaccgtcaaagtctattcactaggacccaaatctctccaggtcccgcaagctagcttcgccgcccacgtttctctttcttctcatattcaattgtcaaaaaacagacctcatgaccaaaatcccttaacgtgagttttcgttccactgagcgtcagaccccgtagaaaagatcaaaggatcttcttgagatcctttttttctgcgcgtaatctgctgcttgcaaacaaaaaaaccaccgctaccagcggtggtttgtttgccggatcaagagctaccaactttttttccgaaggtaactggcttcagcagagcgcagataccaaatactgtccttctagtgtagccgtagttaggccaccacttcaagaactctgtagcaccgcctacatacctcgctctgctaatcctgttaccagtggctgctgccagtggcgataagtcgtgtcttaccgggttggactcaagacgatagttaccggataaggcgcagcggtcgggctgaacggggggttcgtgcacacagcccagcttggagcgaacgacctacaccgaactgagatacctacagcgtgagctatgagaaagcgccacgcttcccgaagggagaaaggcggacaggtatccggtaagcggcagggtcggaacaggagagcgcacgagggagcttccagggggaaacgcctggtatctttatagtcctgtcgggtttcgccacctctgacttgagcgtcgatttttgtgatgctcgtcaggggggcggagcctatggaaaaacgccagcaacgcggcctttttacggttcctggccttttgctggccttttgctcacatgttctttcctgcgttatcccctgattctgtggataaccgtattaccgcctttgagtgagctgataccgctcgccgcagccgaacgaccgagcgcagcgagtcagtgagcgaggaagcggaagagcgcctgatgcggtattttctccttacgcatctgtgcggtatttcacaccgcatatggtgcactctcagtacaatctgctctgatgccgcatagttaagccagtatacaggctctccttcacgatcaacgatcggcatggggccttcgtgcttgttgagtaatgttatcgctcccatcagagcacgcttggtactccgggaatcggatggtctgtcgatcatccaaaaaacgctcatgttttcaacctattaggtctgtggtcagctgaccacagaccatcctgctccatactcgctaattctagccaaaccgcaacgtcccctgcccgctagccttcaagagcgccattatcatcgggccaagtgaaaacttcccgagctcgctccgccgtgtcagatctcggagatagcccccgggcgaattgatgaagttcgctcgctccaaaatgcacgccatcgctgctgccgcattctccggtcccattgcctcacacgcgtcttggtaagccgacgggctgacccccagcatagaccgaaccaccaccgcagccgacatgaggtcacgccagctagcaaccgcaccgctcggcccataattgccaatggtcgggcatgctttcaggatcatcccgagggggaacgcttttatcggctcgctccttgcccggtctatttcactcggcttagcgccctgctccttttcagagcgaggttcaagttcattaacggattcgggttttgaattctgtatgtgctgctcgctctgggcagcattggtgctattattttctgaattgtctctaatttccaaccggttgattatctcttcctggagcatccacatctcttcgagaattgactctacatcagcaagcgtcggggcgcgtggaattctacccacaagttccacatagacttcctcgacagcttgccagtcgccctccgctccctcttccatagctgccgtaattagcttccgaacgtcccgtcggcaaatcgtcagactttctttggccatcctgaatgctgctcgatcggccatcacttgctgtgccatcatcgctagctcttcggaccgcgcgagaagcggagacaaatcgaagccaaacgcgcgctcgatctgaccagcgccatccttacgagcgtaacgctttccgttggcgctatccttccggacgatcaagcctgactccacgagcatggcgatgtgcctacgcaaagtcgcgccagccatcccatgcgcccgaagggcaagctgagcattcgacgggaagacgatcagctgtgcctcctgacgcaactccgtttccgggtgaaagctcaatagcgcatcaaggacggcaagactgttggactggattccaagtagttccatggccgcggacgcatctctaaagaccttccacttgtccgctgtcttgccttgtttgatatcggccagcgccgtctggcgccgcacaagcgcaagcgtcattggccgccgcccgaatggcgtcgttacacttcctgtctgcatcatctttcacctttcagcaggcaaaggaaatcagctcaccaaaacggcgctaaaaactcttgacgaggattcgaggaaatgcgattctgttcgcgctagagagacagaagggcttccgcgacggcgacgttgagggggctcttttcttttgcggtttactctccccgtttccgttggttctcagcgtggtacgcttgatacagcgctggcacatgatcgagcacgaaggtcgcaaaatcgggcgtcgccttcctgtcaatcgtgatttccagtttggccttgctctgcgtcacctgtgcaattctggtgccgtctggggtggccatgacctcgggaagtccacgcgcaacccgactgggcttcagactagcgatcaccgccttgaatcgttctgccgatggcagcgcttgaacttcctccgacatagcatatttagccacgtcggccggtgaagaaactttctcaatcagctcggcaagttgttgccaactcggccgtccaacaccaggagcggcaccaatagcatcggtcagttcagaggggagggcgtcgacgagcagaagcatcttggacaaattgctcttgtcgatcgacatcgcggcgatgacaatctctcgagaaaactgcctgttcaggcgatgtgcgaagcgcgccttttcgatgaaggtaagatcttcgcgctcattgttttcctgaccctgtgctacgaccacttgctcgtccgtcagttcgcgaacgaccgctctgaccggaagtccgagttctgaaacggcgcgtagccggcggtggccgaaggcaacctgatatcggcccggctggctcggatgcggtcgcacaaggattgggacttgctgtccttgttcccggatcgaagtaaggagcccgtcaatgtcccctcgcatacgatcctgcacgaaagacggttctattgacgaggcatccaactctatcactgcctgaccttcagcgaggcgccgctcgatctcttcggcacggctaagacgatcgttttgctctcgcagtgcgttaccaatgttcgctgtgagcttcgttgccggatcgcgctccttccttgttacgccgaggagcggcatggagcggttctttgccgtcctattgtcggcgggcgacgtttcaggggcgtcagttgacacgccaaggatgtgcttccggctcatgtgggcctaccccatgcttttttgatcagtgtttcgatctcgtcgttgacggcgttcatcgcctccaaggctcgatcataggtcgagcgcgtgaacaggccacgctccacttcgaatagagtctggtttgtcaggccagcgtccgaaaccgcggtggttttaagcatcggaaaattgaggacattttcgccaaaaatcgaccgcagataacctaccatttggttctgtggtccgtcgctcggttcgaaacgggttatcagatagcgcatccaattaaacttgaacttggcgccagcattctcgatttcacgcaaaaggttcgatgtcattgccagaaactggttcatcgacatcacatccagcatctgcggatggaccgtgacaagaatggacgtcgccgcagtcaatgcggatagcgtgagatacccaagctggggagggcagtcgatgaccacgacgtcatagttatccgcgatatcttcaattacttggctgatgcgaccataaaagagcgtgtcgccctctttgcggttcatcagcgcgcgtggcgtatcgtgttcaaactccatcagctcaaggttaccaggaatcaggtggaggtcgggaatgtaagtccctcggacgactcgttcgattgccacttgctcatcatcataccttatagcgccgtagagcgtttcgttcgggccaacgtccgtttccggttggctcccaaagagtgcagaaaggctcgcttgaggatcgagatcaatggccaagactcgatatccgcgcatagcgaggtactgcgccagatgcgcggcggtggtggtcttacccgacccacctttgaaattcatcacagagataacctgaagctgctcgccgcctcgacgatgtggcaggtagcgccggttcccgcggccgacctgatccatatacttccgaatcacatggatatcttcaattgagaacattcgcctgccacccgggctcatgctaacattcaactctggcatctcagacgcggtctgccgtaaatatgactcgccaacgccgagcagcttggacgcctccgatggcccgaatgttcgaatgcccttctcggaatgcggcgggaaaaccttaagatgatgtgcttgaagttggctcgagagggcatcggcatgacgctccatcaaggccgtcaaccctacaactacaggcgctgcttttaggacagacttcgccatctcaaacccattccttgccagtggcgatatttttcgcgaaactggaaaagttccgccgctggcaattagcgccgattctgctgtttgggcaagagcttttaggttaacagaaggttaacgccctcaggtcgaaaaactccacccaactgttatttgtatttatttccaatgccttagagagattgccatttgaatatgttcatgtattgttttagtgataatcctacaatcgtaacccaaaaagaggtcgccctctgcgcgccgtcgtccaatataggcgaagtcacccttgcgactcaggcggattctaccttgtacacgtgtcgagtggaaaagtcccatgtggatcactccgttgccccgtcgctcaccgtgttggggggaaggtgcacatggctcagttctcaatggaaattatctgcctaaccggctcagttctgcgtagaaaccaacatgcaagctccaccgggtgcaaagcggcagcggcggcaggatatattcaattgtaaatggcttcatgtccgggaaatctacatggatcagcaatgagtatgatggtcaatatggagaaaaagaaagagtaattaccaattttttttcaattcaaaaatgtagatgtccgcagcgttattataaaatgaaagtacattttgataaaacgacaaattacgatccgtcgtatttataggcgaaagcaataaacaaattattctaattcggaaatctttatttcgacgtgtctacattcacgtccaaatgggggcttagatgagaaacttcacgatcgatgcggccctgccggcgcgccactagtcaacaattggccaatctttgttctaaattgctaataaacgaccatttccgtcaattctccttggttgcaacagtctacccgtcaaatgtttactaatttataagtgtgaagtttgaattatgaaagacgaaatcgtattaaaaattcacaagaataaacaactccatagattttcaaaaaaacagtcacgagaaaaaaaccacagtccgtttgtctgctcttctagtttttattatttttctattaatagttttttgttatttcgagaataaaatttgaacgatgtccgaaccacaaaagccgagccgataaatcctaagccgagcctaactttagccgtaaccatcagtcacggctcccgggctaattcatttgaaccgaatcataatcaacggtttagatcaaactcaaaacaatctaacggcaacatagacgcgtcggtgagctaaaaagagtgtgaaagccaggtcaccatagcattgtctctcccagattttttatttgggaaataatagaagaaatagaaaaaaataaaagagtgagaaaaatcgtagagctatatattcgcacatgtactcgtttcgctttccttagtgttagctgctgccgctgttgtttctcctccatttctctatctttctctctcgctgcttctcgaatcttctgtatcatcttcttcttcttcaaggtgagtctctagatccgttcgcttgattttgctgctcgttagtcgttattgttgattctctatgccgatttcgctagatctgtttagcatgcgttgtggttttatgagaaaatctttgttttgggggttgcttgttatgtgattcgatccgtgcttgttggatcgatctgagctaattcttaaggtttatgtgttagatctatggagtttgaggattcttctcgcttctgtcgatctctcgctgttatttttgtttttttcagtgaagtgaagttgtttagttcgaaatgacttcgtgtatgctcgattgatctggttttaatcttcgatctgttaggtgttgatgtttacaagtgaattctagtgttttctcgttgagatctgtgaagtttgaacctagttttctcaataatcaacatatgaagcgatgtttgagtttcaataaacgctgctaatcttcgaaactaagttgtgatctgattcgtgtttacttcatgagcttatccaattcatttcggtttcattttactttttttttagtgaaccatggcgcaagttagcagaatctgcaatggtgtgcagaacccatctcttatctccaatctctcgaaatccagtcaacgcaaatctcccttatcggtttctctgaagacgcagcagcatccacgagcttatccgatttcgtcgtcgtggggattgaagaagagtgggatgacgttaattggctctgagcttcgtcctcttaaggtcatgtcttctgtttccacggcgtgcatgggggaagcggtgatcgccgaagtatcgactcaactatcagaggtagttggcgtcatcgagcgccatctcgaaccgacgttgctggccgtacatttgtacggctccgcagtggatggcggcctgaagccacacagtgatattgatttgctggttacggtgaccgtaaggcttgatgaaacaacgcggcgagctttgatcaacgaccttttggaaacttcggcttcccctggagagagcgagattctccgcgctgtagaagtcaccattgttgtgcacgacgacatcattccgtggcgttatccagctaagcgcgaactgcaatttggagaatggcagcgcaatgacattcttgcaggtatcttcgagccagccacgatcgacattgatctggctatcttgctgacaaaagcaagagaacatagcgttgccttggtaggtccagcggcggaggaactctttgatccggttcctgaacaggatctatttgaggcgctaaatgaaaccttaacgctatggaactcgccgcccgactgggctggcgatgagcgaaatgtagtgcttacgttgtcccgcatttggtacagcgcagtaaccggcaaaatcgcgccgaaggatgtcgctgccgactgggcaatggagcgcctgccggcccagtatcagcccgtcatacttgaagctagacaggcttatcttggacaagaagaagatcgcttggcctcgcgcgcagatcagttggaagaatttgtccactacgtgaaaggcgagatcaccaaggtagtcggcaaataaggatcaattcccgatcgttcaaacatttggcaataaagtttcttaagattgaatcctgttgccggtcttgcgatgattatcatataatttctgttgaattacgttaagcatgtaataattaacatgtaatgcatgacgttatttatgagatgggtttttatgattagagtcccgcaattatacatttaatacgcgatagaaaacaaaatatagcgcgcaaactaggataaattatcgcgcgcggtgtcatctatgttactagatcacgcgtgtatgcaatatcctgcagggtattaattaattatgccctaagacatcctggaccaatatgctgaagattatgctacctacaccaggataggacttgaagcacttaaccttgaagattggttcgaagaaccagaacccgatccacctaaccctgtggaccgccagaggatagaggacatcctggacctactgaacgtcagcaatgacgactgaaagattcccaggacaccggcggaagtggtggacccagtctaggtgcgatgcttagtcgcgcacgatgactatgtcggaaggcatctttgctttcggcaaactttagtaatactttaaggaaagtattgtacaagttaggtgcagagacaataatgcacccagctttagctttgtttatggaattattgtgtcggttgcattattggatgcctgcgtgcaccctaagcaatcaacggagaaacaaagataaaaatcaattactcacatgaaagagtattgatcacgagtcactatggagcgacaatctccagacaggatgtcagcatcttatcttcctttgaagaaagcatcatcaataacgatgtaatggtggggacatccactaagttattgctctgcaaacagctcaaaaagctactggccgacaatcataattgctcggcatgtccaggtggggcctccactagcaataatacaagctttacagcttgcagtgactcatcctccaataatggagaaaaagacgtcagcagtgacgaacaagggtcgaaagacttgcctatataagggcattctcccctcagttgaagatcatcgaaagttggagcaataaactctctcttcaacaaatctatcttttatcttttatcgccgcaatggcgggatctaagaagagaagaattaaacaagattccgacaaagcgttttactccagcttcatggccctcatgtccctgatgctccaaatgaggaatagcatcacagggcgcaccgacgtcgacttcctcatcagcccggtgaagaactccgacgggatcttttacgactcccgcaactatgaggcgcaagagaatgcgatcctcccgaagaacgccgatgcgaacggggcctataatatcgccaggaaagtgctctgggccatcgggcagttcaaaaaggcggaggatgagaagctcgacaaggtgaaaattgccatttccaacaaggagtggctggagtacgcgcagacctccgtgaagcacggctcctctggcagctccggctctagcggctcctctggcagctccggctccaagctggagaagtttacaaactgttacagcctctccaaaaccctcaggtttaaagcgatcccggtgggcaagacccaggagaacatcgacaacaagaggctcctggtggaagacgagaagcgcgccgaagactacaagggcgtgaagaagctgctcgataggtactacctcagctttattaacgacgtgctgcacagcatcaaactcaagaatctcaacaactacatctccctcttccgcaaaaagacccgcaccgagaaggagaacaaggagctggagaacctggagatcaacctccgcaaggaaatcgccaaagcgttcaagggcaatgaagggtacaagagcctcttcaagaaagacatcatcgaaactatcctcccagagtttctcgatgacaaggacgagatcgcgctggtgaactcctttaacgggttcacaaccgcgtttaccggcttctttgataacagggaaaatatgttctccgaggaggccaagtccaccagcatcgccttcaggtgtatcaacgagaacctcacccgctacatttccaatatggacattttcgagaaggtggatgcgatcttcgataagcacgaggtgcaggagatcaaagagaagattctcaattccgattatgacgtcgaggatttcttcgaaggggagttctttaattttgtgctcacacaagagggcattgacgtgtacaacgcgattatcgggggcttcgtcacagagtccggggagaagattaaggggctgaatgagtacatcaatctgtacaatcagaagaccaagcagaaactgccgaaattcaagccgctctacaagcaagtcctgtccgatagggaaagcctctccttctacggcgagggctataccagcgacgaggaggtgctggaagtcttccgcaacacactgaataagaatagcgagattttctcctccatcaagaagctcgagaagctctttaagaactttgacgagtacagctccgccgggattttcgtgaagaacgggccggcgatcagcaccatctccaaggacatctttggcgagtggaacgtcatcagggacaagtggaacgccgagtacgacgacatccacctgaagaagaaggcggtggtgaccgagaagtatgaggacgatcgcaggaagtccttcaaaaaaatcggctccttcagcctcgaacagctccaggagtatgccgatgcggatctgtccgtcgtcgagaagctgaaggaaatcatcattcagaaggtcgacgagatctataaagtgtacgggtccagcgagaagctgttcgacgccgactttgtgctcgagaagtccctcaaaaagaatgacgccgtggtggccattatgaaagacctgctcgactccgtgaagtccttcgaaaattacattaaagcgttctttggggaggggaaggaaactaacagggatgagtccttctatggcgactttgtcctcgcgtacgacatcctgctgaaggtcgaccacatttacgacgcgatccgcaactacgtgacacagaagccgtactccaaagacaagttcaagctgtacttccagaacccgcaatttatggggggctgggacaaggataaagagacagactaccgcgcgacaattctccgctatggctccaaatactatctggccatcatggacaagaagtacgcgaagtgcctgcagaagatcgacaaagacgacgtcaatggcaactatgaaaagatcaactacaagctgctgccgggcccgaacaagatgctcccgaaggtgttcttcagcaagaagtggatggcctactacaatccaagcgaggatattcagaaaatctataaaaacgggaccttcaagaagggggacatgtttaacctcaacgactgccacaagctcattgatttcttcaaggatagcatttcccgctacccgaaatggtccaatgcgtacgattttaacttctccgagacagaaaagtacaaagacatcgcgggcttttacagggaggtggaggagcaagggtataaagtttcttttgaatccgcgagcaagaaggaagtcgacaagctcgtcgaggagggcaagctctacatgttccaaatttataacaaggacttttccgacaagagccatgggaccccaaacctccacaccatgtacttcaaactgctctttgacgagaacaaccacgggcaaatcaggctgagcggcggcgccgaattattcatgcgcagggcctccctcaagaaggaagagctggtcgtccatccagccaattccccgatcgcgaacaagaacccggacaatccgaaaaagaccaccaccctgtcctacgacgtctacaaggacaaacgcttcagcgaagaccagtacgaattacacatcccaattgcgattaataagtgcccaaagaatatcttcaaaattaatacagaggtcagggtgctgctcaaacacgacgacaatccgtatgtcatcggcattgacaggggcgagcgcaatctgctctatatcgtggtcgtggatgggaagggcaatattgtggagcagtactccctgaacgagattatcaacaacttcaatgggattaggattaagaccgactatcacagcctgctcgacaagaaagaaaaagagaggtttgaggcccgccaaaactggacctccattgagaatatcaaagaattaaaggccggctatatttcccaagtcgtccacaagatctgcgagctggtggagaaatatgacgccgtgattgcgctcgaagacttaaattctgggttcaagaactcccgcgtgaaggtggaaaaacaggtgtatcagaaattcgagaaaatgctgatcgacaaactcaattatatggtggataagaagtccaacccgtgtgccacagggggcgcgctgaagggctatcagatcaccaacaagttcgagagcttcaagagcatgagcacccagaacgggtttattttctacatcccggcgtggctcacctccaagattgacccgagcaccggcttcgtgaacctcctgaagacaaagtatacctccattgccgacagcaagaagtttatctcctccttcgaccgcattatgtatgtgccggaggaggacctcttcgagttcgccctcgactacaaaaacttcagccgcacagatgcggattacatcaagaagtggaagctgtactcctacgggaacaggatccgcatcttcaggaatccaaaaaaaaataacgtctttgactgggaggaagtgtgcctgacatccgcctacaaggaactgttcaataaatacggcatcaattaccagcagggcgacattcgcgccctcctctgtgagcagggatctaagaagagaagaattaaacaagattgatagaagggctctctgtcatgatttcatactttcattattgagctctgtaattacaattatgaccatgagaacatctcttattgtgtggccttttaattgctgatgttagtactgaaccaaagcttatcgtgatgatgtaaaagcaataagtacttgtttgtagcttctttgtgtctccctttgggcttaatacatctgtttagtgttgtggctttggcatagacttctcttggtaataatgccttgcaatgcaaaatttcaattatcaaattctattatgttctcaccttatggtaacagcttaccctgtggaagatgagattcttgagttgagtcattgccaatttttggcattagcttttgaattagtgaattttgacaaaaattaccgtgacactgattttgttgaagctcttaagtgtagtttttacaaaatttcagtggctcgttgtgattatgtcaaactcacggcgaatgtagttcttacagaatttcagtggctcaaggatttaacgcgtgtatgcggccgcaaactatttaaatgcaggcgataaaaatgttttaaacgatatatattataaaaaaaaacgtttcaaaaataaatacaaaaatgtttttaaatatatataatttaactcattaaagaaaataaaaatgcaagtgcggtgacaagacaagctaaaagttgcaaaagaaatggcagggctataaggctcacctactcctggatttaccaaattttggttcgtccctatactcgaaaaataaaacaaaataaatttcagtatcttcgtttttgtatgctttgactgtgaggcgaggccaactttcttcttctgtctgagatgaattttgtttgcctcctgtgaaggatgtatcattcaaagtgaatgttttgcaactgccagtagtcccacatcgaccaaatattcttattacagtgtgtttatatagcacctggagaaggaatgggttgtttcaaagattaaataatttctactaagtgtagatcaagggactcaacatcaaaggattaatttctactaagtgtagatcaagggactcaacatcaaaggattaatttctactaagtgtagatcaagggactcaacatcaaaggattaatttctactaagtgtagatttttttttgcggccgcaacagagaaactagacctgcaggaaggcgccggcgctctcttaaggtagc

SEQ ID NO: 734 - DNA, 15628 bp, synthetic construct
  source 1..15628: mol_type = other DNA
aaggatccctgaaagcgacgttggatgttaacatctacaaattgccttttcttatcgaccatgtacgtaagcgcttacgtttttggtggacccttgaggaaactggtagctgttgtgggcctgtggtctcaagatggatcattaatttccaccttcacctacgatggggggcatcgcaccggtgagtaatattgtacggctaagagcgaatttggcctgtagacctcaattgcgagctttctaatttcaaactattcgggcctaacttttggtgtgatgatgctgactggcaggatatataccgttgtaatttgagctcgtgtgaataagtcgctgtgtatgtttgtttgattgtttctgttggagtgcagcccatttcaccggacaagtcggctagattgatttagccctgatgaactgccgaggggaagccatcttgagcgcggaatgggaatggatttcgttgtacaacgagacgacagaacacccacgggaccgagcttcgaagctttaacgcttgagttaagccgcgccgcgaagcggcgtcggcttgaacgaattgttagacatcagaagaactcgtcaagaaggcgatagaaggcgatgcgctgcgaatcgggagcggcgataccgtaaagcacgaggaagcggtcagcccattcgccgccaagctcttcagcaatatcacgggtagccaacgctatgtcctgatagcggtccgccacacccagccggccacagtcgatgaatccagaaaagcggccattttccaccatgatattcggcaagcaggcatcgccatgggtcacgacgagatcctcgccgtcgggcatgcgcgccttgagcctggcgaacagttcggctggcgcgagcccctgatgctcttcgtccagatcatcctgatcgacaagaccggcttccatccgagtacgtgctcgctcgatgcgatgtttcgcttggtggtcgaatgggcaggtagccggatcaagcgtatgcagccgccgcattgcatcagccatgatggatactttctcggcaggagcaaggtgagatgacaggagatcctgccccggcacttcgcccaatagcagccagtcccttcccgcttcagtgacaacgtcgagcacagctgcgcaaggaacgcccgtcgtggccagccacgatagccgcgctgcctcgtcctgcagttcattcagggcaccggacaggtcggtcttgacaaaaagaaccgggcgcccctgcgctgacagccggaacacggcggcatcagagcagccgattgtctgttgtgcccagtcatagccgaatagcctctccacccaagcggccggagaacctgcgtgcaatccatcttgttcaatcatggctttgtttctccttcaatcattgactattgtcacgttattctgaatcgacgagaactcacatcaatctcaacaagcatctctgctcgcgaaattggtgttgtctcattaaaacgtgaccgtcaaagtctattcactaggacccaaatctctccaggtcccgcaagctagcttcgccgcccacgtttctctttcttctcatattcaattgtcaaaaaacagacctcatgaccaaaatcccttaacgtgagttttcgttccactgagcgtcagaccccgtagaaaagatcaaaggatcttcttgagatcctttttttctgcgcgtaatctgctgcttgcaaacaaaaaaaccaccgctaccagcggtggtttgtttgccggatcaagagctaccaactttttttccgaaggtaactggcttcagcagagcgcagataccaaatactgtccttctagtgtagccgtagttaggccaccacttcaagaactctgtagcaccgcctacatacctcgctctgctaatcctgttaccagtggctgctgccagtggcgataagtcgtgtcttaccgggttggactcaagacgatagttaccggataaggcgcagcggtcgggctgaacggggggttcgtgcacacagcccagcttggagcgaacgacctacaccgaactgagatacctacagcgtgagctatgagaaagcgccacgcttcccgaagggagaaaggcggacaggtatccggtaagcggcagggtcggaacaggagagcgcacgagggagcttccagggggaaacgcctggtatctttatagtcctgtcgggtttcgccacctctgacttgagcgtcgatttttgtgatgctcgtcaggggggcggagcctatggaaaaacgccagcaacgcggcctttttacggttcctggccttttgctggccttttgctcacatgttctttcctgcgttatcccctgattctgtggataaccgtattaccgcctttgagtgagctgataccgctcgccgcagccgaacgaccgagcgcagcgagtcagtgagcgaggaagcggaagagcgcctgatgcggtattttctccttacgcatctgtgcggtatttcacaccgcatatggtgcactctcagtacaatctgctctgatgccgcatagttaagccagtatacaggctctccttcacgatcaacgatcggcatggggccttcgtgcttgttgagtaatgttatcgctcccatcagagcacgcttggtactccgggaatcggatggtctgtcgatcatccaaaaaacgctcatgttttcaacctattaggtctgtggtcagctgaccacagaccatcctgctccatactcgctaattctagccaaaccgcaacgtcccctgcccgctagccttcaagagcgccattatcatcgggccaagtgaaaacttcccgagctcgctccgccgtgtcagatctcggagatagcccccgggcgaattgatgaagttcgctcgctccaaaatgcacgccatcgctgctgccgcattctccggtcccattgcctcacacgcgtcttggtaagccgacgggctgacccccagcatagaccgaaccaccaccgcagccgacatgaggtcacgccagctagcaaccgcaccgctcggcccataattgccaatggtcgggcatgctttcaggatcatcccgagggggaacgcttttatcggctcgctccttgcccggtctatttcactcggcttagcgccctgctccttttcagagcgaggttcaagttcattaacggattcgggttttgaattctgtatgtgctgctcgctctgggcagcattggtgctattattttctgaattgtctctaatttccaaccggttgattatctcttcctggagcatccacatctcttcgagaattgactctacatcagcaagcgtcggggcgcgtggaattctacccacaagttccacatagacttcctcgacagcttgccagtcgccctccgctccctcttccatagctgccgtaattagcttccgaacgtcccgtcggcaaatcgtcagactttctttggccatcctgaatgctgctcgatcggccatcacctgctgtgccatcatcgctagctcttcggaccgcgcgagaagcggagacaaatcgaagccaaacgcgcgctcgatctgaccagcgccatccttacgagcgtaacgctttccgttggcgctatccttccggacgatcaagcctgactccacgagcatggcgatgtgcctacgcaaagtcgcgccagccatcccatgcgcccgaagggcaagctgagcattcgacgggaagacgatcagctgtgcctcctgacgcaactccgtttccgggtgaaagctcaatagcgcatcaaggacggcaagactgttggactggattccaagtagttccatggccgcggacgcgtctctaaagaccttccacttgtccgctgtcttgccttgtttgatatcggccagcgccgtctggcgccgcacaagcgcaagcgtcattggccgccgcccgaatggcgtcgttacacttcctgtctgcatcatctttcacctttcagcaggcaaaggaaatcagctcaccaaaacggcgctaaaaactcttgacgaggattcgaggaaatgcgattctgttcgcgctagagagacagaagggcttccgcgacggcgacgttgagggggctcttttcttttgcggtttactctccccgtttccgttggttctcagcgtggtacgcttgatacagcgctggcacatgatcgagcacgaaggtcgcaaaatcgggcgtcgccttcctgtcaatcgtgatttccagtttggccttgctctgcgtcacctgtgcaattctggtgccgtctggggtggccatgacctcgggaagtccacgcgcaacccgactgggcttcagactagcgatcaccgccttgaatcgttctgccgatggcagcgcttgaacttcctccgacatagcatatttagccacgtcggccggtgaagaaactttctcaatcagctcggcaagttgttgccaactcggccgtccaacaccaggagcggcaccaatagcatcggtcagttcagaggggagggcgtcgacgagcagaagcatcttggacaaattgctcttgtcgatcgacatcgcggcgatgacaatctctcgagaaaactgcctgttcaggcgatgtgcgaagcgcgccttttcgatgaaggtaagatcttcgcgctcattgttttcctgaccctgtgctacgaccacttgctcgtccgtcagttcgcgaacgaccgctctgaccggaagtccgagttctgaaacggcgcgtagccggcggtggccgaaggcaacctgatatcggcccggctggctcggatgcggtcgcacaaggattgggacttgctgtccttgttcccggatcgaagtaaggagcccgtcaatgtcccctcgcatacgatcctgcacgaaagacggttctattgacgaggcatccaactctatcactgcctgaccttcagcgagacgccgctcgatctcttcggcacggctaagacgatcgttttgctctcgcagtgcgttaccaatgttcgctgtgagcttcgttgccggatcgcgctccttccttgttacgccgaggagcggcatggagcggttctttgccgtcctattgtcggcgggcgacgtctcaggggcgtcagttgagacgccaaggatgtgcttccggctcatgtgggcctaccccatgcttttttgatcagtgtttcgatctcgtcgttgacggcgttcatcgcctccaaggctcgatcataggtcgagcgcgtgaacaggccacgctccacttcgaatagagtctggtttgtcaggccagcgtccgaaaccgcggtggttttaagcatcggaaaattgaggacattttcgccaaaaatcgaccgcagataacctaccatttggttctgtggtccgtcgctcggttcgaaacgggttatcagatagcgcatccaattaaacttgaacttggcgccagcattctcgatttcacgcaaaaggttcgatgtcattgccagaaactggttcatcgacatcacatccagcatctgcggatggaccgtgacaagaatggacgtcgccgcagtcaatgcggatagcgtgagatacccaagctggggagggcagtcgatgaccacgacgtcatagttatccgcgatatcttcaattacttggctgatgcgaccataaaagagcgtgtcgccctctttgcggttcatcagcgcgcgtggcgtatcgtgttcaaactccatcagctcaaggttaccaggaatcaggtggaggtcgggaatgtaagtccctcggacgactcgttcgattgccacctgctcatcatcataccttatagcgccgtagagcgtttcgttcgggccaacgtccgtctccggttggctcccaaagagtgcagaaaggctcgcttgaggatcgagatcaatggccaagactcgatatccgcgcatagcgaggtactgcgccagatgcgcggcggtggtggtcttacccgacccacctttgaaattcatcacagagataacctgaagctgctcgccgcctcgacgatgtggcaggtagcgccggttcccgcggccgacctgatccatatacttccgaatcacatggatatcttcaattgagaacattcgcctgccacccgggctcatgctaacattcaactctggcatctcagacgcggtctgccgtaaatatgactcgccaacgccgagcagcttggacgcctccgatggcccgaatgttcgaatgcccttctcggaatgcggcgggaaaaccttaagatgatgtgcttgaagttggctcgagagggcatcggcatgacgctccatcaaggccgtcaaccctacaactacaggcgctgcttttaggacagacttcgccatctcaaacccattccttgccagtggcgatatttttcgcgaaactggaaaagttccgccgctggcaattagcgccgattctgctgtttgggcaagagcttttaggttaacagaaggttaacgccctcaggtcgaaaaactccacccaactgttatttgtatttatttccaatgccttagagagattgccatttgaatatgttcatgtattgttttagtgataatcctacaatcgtaacccaaaaagaggtcgccctctgcgcgccgtcgtccaatataggcgaagtcacccttgcgactcaggcggattctaccttgtacacgtgtcgagtggaaaagtcccatgtggatcactccgttgccccgtcgctcaccgtgttggggggaaggtgcacatggctcagttctcaatggaaattatctgcctaaccggctcagttctgcgtagaaaccaacatgcaagctccaccgggtgcaaagcggcagcggcggcaggatatattcaattgtaaatggcttcatgtccgggaaatctacatggatcagcaatgagtatgatggtcaatatggagaaaaagaaagagtaattaccaattttttttcaattcaaaaatgtagatgtccgcagcgttattataaaatgaaagtacattttgataaaacgacaaattacgatccgtcgtatttataggcgaaagcaataaacaaattattctaattcggaaatctttatttcgacgtgtctacattcacgtccaaatgggggcttagatgagaaacttcacgatcgatgcggccctaggcgtacgataacttcgtataatgtatgctatacgaagttatcactagtcaacaattggccaatctttgttctaaattgctaataaacgaccatttccgtcaattctccttggttgcaacagtctacccgtcaaatgtttactaatttataagtgtgaagtttgaattatgaaagacgaaatcgtattaaaaattcacaagaataaacaactccatagattttcaaaaaaacagtcacgagaaaaaaaccacagtccgtttgtctgctcttctagtttttattatttttctattaatagttttttgttatttcgagaataaaatttgaacgatgtccgaaccacaaaagccgagccgataaatcctaagccgagcctaactttagccgtaaccatcagtcacggctcccgggctaattcatttgaaccgaatcataatcaacggtttagatcaaactcaaaacaatctaacggcaacatagacgcgtcggtgagctaaaaagagtgtgaaagccaggtcaccatagcattgtctctcccagattttttatttgggaaataatagaagaaatagaaaaaaataaaagagtgagaaaaatcgtagagctatatattcgcacatgtactcgtttcgctttccttagtgttagctgctgccgctgttgtttctcctccatttctctatctttctctctcgctgcttctcgaatcttctgtatcatcttcttcttcttcaaggtgagtctctagatccgttcgcttgattttgctgctcgttagtcgttattgttgattctctatgccgatttcgctagatctgtttagcatgcgttgtggttttatgagaaaatctttgttttgggggttgcttgttatgtgattcgatccgtgcttgttggatcgatctgagctaattcttaaggtttatgtgttagatctatggagtttgaggattcttctcgcttctgtcgatctctcgctgttatttttgtttttttcagtgaagtgaagttgtttagttcgaaatgacttcgtgtatgctcgattgatctggttttaatcttcgatctgttaggtgttgatgtttacaagtgaattctagtgttttctcgttgagatctgtgaagtttgaacctagttttctcaataatcaacatatgaagcgatgtttgagtttcaataaacgctgctaatcttcgaaactaagttgtgatctgattcgtgtttacttcatgagcttatccaattcatttcggtttcattttactttttttttagtgaaccatggcgcaagttagcagaatctgcaatggtgtgcagaacccatctcttatctccaatctctcgaaatccagtcaacgcaaatctcccttatcggtttctctgaagacgcagcagcatccacgagcttatccgatttcgtcgtcgtggggattgaagaagagtgggatgacgttaattggctctgagcttcgtcctcttaaggtcatgtcttctgtttccacggcgtgcatgggggaagcggtgatcgccgaagtatcgactcaactatcagaggtagttggcgtcatcgagcgccatctcgaaccgacgttgctggccgtacatttgtacggctccgcagtggatggcggcctgaagccacacagtgatattgatttgctggttacggtgaccgtaaggcttgatgaaacaacgcggcgagctttgatcaacgaccttttggaaacttcggcttcccctggagagagcgagattctccgcgctgtagaagtcaccattgttgtgcacgacgacatcattccgtggcgttatccagctaagcgcgaactgcaatttggagaatggcagcgcaatgacattcttgcaggtatcttcgagccagccacgatcgacattgatctggctatcttgctgacaaaagcaagagaacatagcgttgccttggtaggtccagcggcggaggaactctttgatccggttcctgaacaggatctatttgaggcgctaaatgaaaccttaacgctatggaactcgccgcccgactgggctggcgatgagcgaaatgtagtgcttacgttgtcccgcatttggtacagcgcagtaaccggcaaaatcgcgccgaaggatgtcgctgccgactgggcaatggagcgcctgccggcccagtatcagcccgtcatacttgaagctagacaggcttatcttggacaagaagaagatcgcttggcctcgcgcgcagatcagttggaagaatttgtccactacgtgaaaggcgagatcaccaaggtagtcggcaaataaggatcaattcccgatcgttcaaacatttggcaataaagtttcttaagattgaatcctgttgccggtcttgcgatgattatcatataatttctgttgaattacgttaagcatgtaataattaacatgtaatgcatgacgttatttatgagatgggtttttatgattagagtcccgcaattatacatttaatacgcgatagaaaacaaaatatagcgcgcaaactaggataaattatcgcgcgcggtgtcatctatgttactagatcggggatccaacgttataacttcgtataatgtatgctatacgaagttattaactataacggtcctaaggtagcgacttaggctgagcccgggcaggcctacccataatacccataatagctgtttgccaatcgttcttcttggcgcgccagacatcctggaccaatatgctgaagattatgctacctacaccaggataggacttgaagcacttaaccttgaagattggttcgaagaaccagaacccgatccacctaaccctgtggaccgccagaggatagaggacatcctggacctactgaacgtcagcaatgacgactgaaagattcccaggacaccggcggaagtggtggacccagtctaggtgcgatgcttagtcgcgcacgatgactatgtcggaaggcatctttgctttcggcaaactttagtaatactttaaggaaagtattgtacaagttaggtgcagagacaataatgcacccagctttagctttgtttatggaattattgtgtcggttgcattattggatgcctgcgtgcaccctaagcaatcaacggagaaacaaagataaaaatcaattactcacatgaaagagtattgatcacgagtcactatggagcgacaatctccagacaggatgtcagcatcttatcttcctttgaagaaagcatcatcaataacgatgtaatggtggggacatccactaagttattgctctgcaaacagctcaaaaagctactggccgacaatcataattgctcggcatgtgcaggtggggcctccactagcaataatacaagctttacagcttgcagtgactcatcctccaataatggagaaaaagacgtcagcagtgacgaacaagggtcgaaagacttgcctatataagggcattctcccctcagttgaagatcatcgaaagttggagcaataaactctctcttcaacaaatctatcttttatcttttatcggtaccaaaaaatggcgggatctaagaagagaagaattaaacaagattccaagctggagaagtttacaaactgttacagcctctccaaaaccctcaggtttaaagcgatcccggtgggcaagacccaggagaacatcgacaacaagaggctcctggtggaagacgagaagcgcgccgaagactacaagggcgtgaagaagctgctcgataggtactacctcagctttattaacgacgtgctgcacagcatcaaactcaagaatctcaacaactacatctccctcttccgcaaaaagacccgcaccgagaaggagaacaaggagctggagaacctggagatcaacctccgcaaggaaatcgccaaagcgttcaagggcaatgaagggtacaagagcctcttcaagaaagacatcatcgaaactatcctcccagagtttctcgatgacaaggacgagatcgcgctggtgaactcctttaacgggttcacaaccgcgtttaccggcttctttgataacagggaaaatatgttctccgaggaggccaagtccaccagcatcgccttcaggtgtatcaacgagaacctcacccgctacatttccaatatggacattttcgagaaggtggatgcgatcttcgataagcacgaggtgcaggagatcaaagagaagattctcaattccgattatgacgtcgaggatttcttcgaaggggagttctttaattttgtgctcacacaagagggcattgacgtgtacaacgcgattatcgggggcttcgtcacagagtccggggagaagattaaggggctgaatgagtacatcaatctgtacaatcagaagaccaagcagaaactgccgaaattcaagccgctctacaagcaagtcctgtccgatagggaaagcctctccttctacggcgagggctataccagcgacgaggaggtgctggaagtcttccgcaacacactgaataagaatagcgagattttctcctccatcaagaagctcgagaagctctttaagaactttgacgagtacagctccgccgggattttcgtgaagaacgggccggcgatcagcaccatctccaaggacatctttggcgagtggaacgtcatcagggacaagtggaacgccgagtacgacgacatccacctgaagaagaaggcggtggtgaccgagaagtatgaggacgatcgcaggaagtccttcaaaaaaatcggctccttcagcctcgaacagctccaggagtatgccgatgcggatctgtccgtcgtcgagaagctgaaggaaatcatcattcagaaggtcgacgagatctataaagtgtacgggtccagcgagaagctgttcgacgccgactttgtgctcgagaagtccctcaaaaagaatgacgccgtggtggccattatgaaagacctgctcgactccgtgaagtccttcgaaaattacattaaagcgttctttggggaggggaaggaaactaacagggatgagtccttctatggcgactttgtcctcgcgtacgacatcctgctgaaggtcgaccacatttacgacgcgatccgcaactacgtgacacagaagccgtactccaaagacaagttcaagctgtacttccagaacccgcaatttatggggggctgggacaaggataaagagacagactaccgcgcgacaattctccgctatggctccaaatactatctggccatcatggacaagaagtacgcgaagtgcctgcagaagatcgacaaagacgacgtcaatggcaactatgaaaagatcaactacaagctgctgccgggcccgaacaagatgctcccgaaggtgttcttcagcaagaagtggatggcctactacaatccaagcgaggatattcagaaaatctataaaaacgggaccttcaagaagggggacatgtttaacctcaacgactgccacaagctcattgatttcttcaaggatagcatttcccgctacccgaaatggtccaatgcgtacgattttaacttctccgagacagaaaagtacaaagacatcgcgggcttttacagggaggtggaggagcaagggtataaagtttcttttgaatccgcgagcaagaaggaagtcgacaagctcgtcgaggagggcaagctctacatgttccaaatttataacaaggacttttccgacaagagccatgggaccccaaacctccacaccatgtacttcaaactgctctttgacgagaacaaccacgggcaaatcaggctgagcggcggcgccgaattattcatgcgcagggcctccctcaagaaggaagagctggtcgtccatccagccaattccccgatcgcgaacaagaacccggacaatccgaaaaagaccaccaccctgtcctacgacgtctacaaggacaaacgcttcagcgaagaccagtacgaattacacatcccaattgcgattaataagtgcccaaagaatatcttcaaaattaatacagaggtcagggtgctgctcaaacacgacgacaatccgtatgtcatcggcattgacaggggcgagcgcaatctgctctatatcgtggtcgtggatgggaagggcaatattgtggagcagtactccctgaacgagattatcaacaacttcaatgggattaggattaagaccgactatcacagcctgctcgacaagaaagaaaaagagaggtttgaggcccgccaaaactggacctccattgagaatatcaaagaattaaaggccggctatatttcccaagtcgtccacaagatctgcgagctggtggagaaatatgacgccgtgattgcgctcgaagacttaaattctgggttcaagaactcccgcgtgaaggtggaaaaacaggtgtatcagaaattcgagaaaatgctgatcgacaaactcaattatatggtggataagaagtccaacccgtgtgccacagggggcgcgctgaagggctatcagatcaccaacaagttcgagagcttcaagagcatgagcacccagaacgggtttattttctacatcccggcgtggctcacctccaagattgacccgagcaccggcttcgtgaacctcctgaagacaaagtatacctccattgccgacagcaagaagtttatctcctccttcgaccgcattatgtatgtgccggaggaggacctcttcgagttcgccctcgactacaaaaacttcagccgcacagatgcggattacatcaagaagtggaagctgtactcctacgggaacaggatccgcatcttcaggaatccaaaaaaaaataacgtctttgactgggaggaagtgtgcctgacatccgcctacaaggaactgttcaataaatacggcatcaattaccagcagggcgacattcgcgccctcctctgtgagcagtccgacaaagcgttttactccagcttcatggccctcatgtccctgatgctccaaatgaggaatagcatcacagggcgcaccgacgtcgacttcctcatcagcccggtgaagaactccgacgggatcttttacgactcccgcaactatgaggcgcaagagaatgcgatcctcccgaagaacgccgatgcgaacggggcctataatatcgccaggaaagtgctctgggccatcgggcagttcaaaaaggcggaggatgagaagctcgacaaggtgaaaattgccatttccaacaaggagtggctggagtacgcgcagacctccgtgaagcacggatctaagaagagaagaattaaacaagattgacttaattaaagggctctctgtcatgatttcatactttcattattgagctctgtaattacaattatgaccatgagaacatctcttattgtgtggccttttaattgctgatgttagtactgaaccaaagcttatcgtgatgatgtaaaagcaataagtacttgtttgtagcttctttgtgtctccctttgggcttaatacatctgtttagtgttgtggctttggcatagacttctcttggtaataatgccttgcaatgcaaaatttcaattatcaaattctattatgttctcaccttatggtaacagcttaccctgtggaagatgagattcttgagttgagtcattgccaatttttggcattagcttttgaattagtgaattttgacaaaaattaccgtgacactgattttgttgaagctcttaagtgtagtttttacaaaatttcagtggctcgttgtgattatgtcaaactcacggcgaatgtagttcttacagaatttcagtggctcgggcccggccgtgacggccacgagcgaactcctgcaggcgataaaaatgttttaaacgatatatattataaaaaaaaacgtttcaaaaataaatacaaaaatgtttttaaatatatataatttaactcattaaagaaaataaaaatgcaagtgcggtgacaagacaagctaaaagttgcaaaagaaatggcagggctataaggctcacctactcctggatttaccaaattttggttcgtccctatactcgaaaaataaaacaaaataaatttcagtatcttcgtttttgtatgctttgactgtgaggcgaggccaactttcttcttctgtctgagatgaattttgtttgcctcctgtgaaggatgtatcattcaaagtgaatgttttgcaactgccagtagtcccacatcgaccaaatattcttattacagtgtgtttatatagcacctggagaaggaatgggttgtttcaaagattaaataatttctactaagtgtagatcaagggactcaacatcaaaggattaatttctactaagtgtagatcaagggactcaacatcaaaggattaatttctactaagtgtagatcaagggactcaacatcaaaggattaatttctactaagtgtagatttttttttgcggccgcacaacaaacgcgccggcgctctcttaaggtagc

SEQ ID NO: 735 - protein, 1143 aa, synthetic construct
RTEKENKELENLEINLRKEIAKAFKGNEGYKSLFKKDIIETILPEFLDDKDEIALVNSFNGFTTAFTGFFRNRENMFSEEAKSTSIAFRCINENLTRYISNMDIFEKVDAIFDKHEVQEIKEKILNSDYDVEDFFEGEFFNFVLTQEGIDVYNAIIGGFVTESGEKIKGLNEYINLYNQKTKQKLPKFKPLYKQVLSDRESLSFYGEGYTSDEEVLEVFRNTLNKNSEIFSSIKKLEKLFKNFDEYSSAGIFVKNGPAISTISKDIFGEWNVIRDKWNAEYDDIHLKKKAVVTEKYEDDRRKSFKKIGSFSLEQLQEYADADLSVVEKLKEIIIQKVDEIYKVYGSSEKLFDADFVLEKSLKKNDAVVAIMKDLLDSVKSFENYIKAFFGEGKETNRDESFYGDFVLAYDILLKVDHIYDAIRNYVTQKPYSKDKFKLYFQNPQFMGGWDKDKETDYRATILRYGSKYYLAIMDKKYAKCLQKIDKDDVNGNYEKINYKLLPGPNKMLPKVFFSKKWMAYYNPSEDIQKIYKNGTFKKGDMFNLNDCHKLIDFFKDSISRYPKWSNAYDFNFSETEKYKDIAGFYREVEEQGYKVSFESASKKEVDKLVEEGKLYMFQIYNKDFSDKSHGTPNLHTMYFKLLFDENNHGQIRLSGGAELFMRRASLKKEELVVHPANSPIANKNPDNPKKTTTLSYDVYKDKRFSEDQYELHIPIAINKCPKNIFKINTEVRVLLKHDDNPYVIGIDRGERNLLYIVVVDGKGNIVEQYSLNEIINNFNGIRIKTDYHSLLDKKEKERFEARQNWTSIENIKELKAGYISQVVHKICELVEKYDAVIALEDLNSGFKNSRVKVEKQVYQKFEKMLIDKLNYMVDKKSNPCATGGALKGYQITNKFESFKSMSTQNGFIFYIPAWLTSKIDPSTGFVNLLKTKYTSIADSKKFISSFDRIMYVPEEDLFEFALDYKNFSRTDADYIKKWKLYSYGNRIRIFRNPKKNNVFDWEEVCLTSAYKELFNKYGINYQQGDIRALLCEQSDKAFYSSFMALMSLMLQMRNSITGRTDVDFLISPVKNSDGIFYDSRNYEAQENAILPKNADANGAYNIARKVLWAIGQFKKAEDEKLDKVKIAISNKEWLEYAQTSVKH

SEQ ID NO: 736 - protein, 1243 aa, synthetic construct
GYTSDEEVLEVFRNTLNKNSEIFSSIKKLEKLFKNFDEYSSAGIFVKNGPAISTISKDIFGEWNVIRDKWNAEYDDIHLKKKAVVTEKYEDDRRKSFKKIGSFSLEQLQEYADADLSVVEKLKEIIIQKVDEIYKVYGSSEKLFDADFVLEKSLKKNDAVVAIMKDLLDSVKSFENYIKAFFGEGKETNRDESFYGDFVLAYDILLKVDHIYDAIRNYVTQKPYSKDKFKLYFQNPQFMGGWDKDKETDYRATILRYGSKYYLAIMDKKYAKCLQKIDKDDVNGNYEKINYKLLPGPNKMLPKVFFSKKWMAYYNPSEDIQKIYKNGTFKKGDMFNLNDCHKLIDFFKDSISRYPKWSNAYDFNFSETEKYKDIAGFYREVEEQGYKVSFESASKKEVDKLVEEGKLYMFQIYNKDFSDKSHGTPNLHTMYFKLLFDENNHGQIRLSGGAELFMRRASLKKEELVVHPANSPIANKNPDNPKKTTTLSYDVYKDKRFSEDQYELHIPIAINKCPKNIFKINTEVRVLLKHDDNPYVIGIDRGERNLLYIVVVDGKGNIVEQYSLNEIINNFNGIRIKTDYHSLLDKKEKERFEARQNWTSIENIKELKAGYISQVVHKICELVEKYDAVIALEDLNSGFKNSRVKVEKQVYQKFEKMLIDKLNYMVDKKSNPCATGGALKGYQITNKFESFKSMSTQNGFIFYIPAWLTSKIDPSTGFVNLLKTKYTSIADSKKFISSFDRIMYVPEEDLFEFALDYKNFSRTDADYIKKWKLYSYGNRIRIFRNPKKNNVFDWEEVCLTSAYKELFNKYGINYQQGDIRALLCEQSDKAFYSSFMALMSLMLQMRNSITGRTDVDFLISPVKNSDGIFYDSRNYEAQENAILPKNADANGAYNIARKVLWAIGQFKKAEDEKLDKVKIAISNKEWLEYAQTSVKHGSSGSSGSSGSSGSSGSKLEKFTNCYSLSKTLRFKAIPVGKTQENIDNKRLLVEDEKRAEDYKGVKKLLDRYYLSFINDVLHSIKLKNLNNYISLFRKKTRTEKENKELENLEINLRKEIAKAFKGNEGYKSLFKKDIIETILPEFLDDKDEIALVNSFNGFTTAFTGFFRNRENMFSEEAKSTSIAFRCINENLTRYISNMDIFEKVDAIFDKHEVQEIKEKILNSDYDVEDFFEGEFFNFVLTQEGIDVYNAIIGGFVTESGEKIKGLNEYINLYNQKTKQKLPKFKPLYKQVLSDRESLSFYGE

SEQ ID NO: 737 - protein, 1243 aa, synthetic construct
SDGIFYDSRNYEAQENAILPKNADANGAYNIARKVLWAIGQFKKAEDEKLDKVKIAISNKEWLEYAQTSVKHGSSGSSGSSGSSGSSGSKLEKFTNCYSLSKTLRFKAIPVGKTQENIDNKRLLVEDEKRAEDYKGVKKLLDRYYLSFINDVLHSIKLKNLNNYISLFRKKTRTEKENKELENLEINLRKEIAKAFKGNEGYKSLFKKDIIETILPEFLDDKDEIALVNSFNGFTTAFTGFFRNRENMFSEEAKSTSIAFRCINENLTRYISNMDIFEKVDAIFDKHEVQEIKEKILNSDYDVEDFFEGEFFNFVLTQEGIDVYNAIIGGFVTESGEKIKGLNEYINLYNQKTKQKLPKFKPLYKQVLSDRESLSFYGEGYTSDEEVLEVFRNTLNKNSEIFSSIKKLEKLFKNFDEYSSAGIFVKNGPAISTISKDIFGEWNVIRDKWNAEYDDIHLKKKAVVTEKYEDDRRKSFKKIGSFSLEQLQEYADADLSVVEKLKEIIIQKVDEIYKVYGSSEKLFDADFVLEKSLKKNDAVVAIMKDLLDSVKSFENYIKAFFGEGKETNRDESFYGDFVLAYDILLKVDHIYDAIRNYVTQKPYSKDKFKLYFQNPQFMGGWDKDKETDYRATILRYGSKYYLAIMDKKYAKCLQKIDKDDVNGNYEKINYKLLPGPNKMLPKVFFSKKWMAYYNPSEDIQKIYKNGTFKKGDMFNLNDCHKLIDFFKDSISRYPKWSNAYDFNFSETEKYKDIAGFYREVEEQGYKVSFESASKKEVDKLVEEGKLYMFQIYNKDFSDKSHGTPNLHTMYFKLLFDENNHGQIRLSGGAELFMRRASLKKEELVVHPANSPIANKNPDNPKKTTTLSYDVYKDKRFSEDQYELHIPIAINKCPKNIFKINTEVRVLLKHDDNPYVIGIDRGERNLLYIVVVDGKGNIVEQYSLNEIINNFNGIRIKTDYHSLLDKKEKERFEARQNWTSIENIKELKAGYISQVVHKICELVEKYDAVIALEDLNSGFKNSRVKVEKQVYQKFEKMLIDKLNYMVDKKSNPCATGGALKGYQITNKFESFKSMSTQNGFIFYIPAWLTSKIDPSTGFVNLLKTKYTSIADSKKFISSFDRIMYVPEEDLFEFALDYKNFSRTDADYIKKWKLYSYGNRIRIFRNPKKNNVFDWEEVCLTSAYKELFNKYGINYQQGDIRALLCEQSDKAFYSSFMALMSLMLQMRNSITGRTDVDFLISPVKN

SEQ ID NO: 738 - protein, 1243 aa, synthetic construct
KDKFKLYFQNPQFMGGWDKDKETDYRATILRYGSKYYLAIMDKKYAKCLQKIDKDDVNGNYEKINYKLLPGPNKMLPKVFFSKKWMAYYNPSEDIQKIYKNGTFKKGDMFNLNDCHKLIDFFKDSISRYPKWSNAYDFNFSETEKYKDIAGFYREVEEQGYKVSFESASKKEVDKLVEEGKLYMFQIYNKDFSDKSHGTPNLHTMYFKLLFDENNHGQIRLSGGAELFMRRASLKKEELVVHPANSPIANKNPDNPKKTTTLSYDVYKDKRFSEDQYELHIPIAINKCPKNIFKINTEVRVLLKHDDNPYVIGIDRGERNLLYIVVVDGKGNIVEQYSLNEIINNFNGIRIKTDYHSLLDKKEKERFEARQNWTSIENIKELKAGYISQVVHKICELVEKYDAVIALEDLNSGFKNSRVKVEKQVYQKFEKMLIDKLNYMVDKKSNPCATGGALKGYQITNKFESFKSMSTQNGFIFYIPAWLTSKIDPSTGFVNLLKTKYTSIADSKKFISSFDRIMYVPEEDLFEFALDYKNFSRTDADYIKKWKLYSYGNRIRIFRNPKKNNVFDWEEVCLTSAYKELFNKYGINYQQGDIRALLCEQSDKAFYSSFMALMSLMLQMRNSITGRTDVDFLISPVKNSDGIFYDSRNYEAQENAILPKNADANGAYNIARKVLWAIGQFKKAEDEKLDKVKIAISNKEWLEYAQTSVKHGSSGSSGSSGSSGSSGSKLEKFTNCYSLSKTLRFKAIPVGKTQENIDNKRLLVEDEKRAEDYKGVKKLLDRYYLSFINDVLHSIKLKNLNNYISLFRKKTRTEKENKELENLEINLRKEIAKAFKGNEGYKSLFKKDIIETILPEFLDDKDEIALVNSFNGFTTAFTGFFRNRENMFSEEAKSTSIAFRCINENLTRYISNMDIFEKVDAIFDKHEVQEIKEKILNSDYDVEDFFEGEFFNFVLTQEGIDVYNAIIGGFVTESGEKIKGLNEYINLYNQKTKQKLPKFKPLYKQVLSDRESLSFYGEGYTSDEEVLEVFRNTLNKNSEIFSSIKKLEKLFKNFDEYSSAGIFVKNGPAISTISKDIFGEWNVIRDKWNAEYDDIHLKKKAVVTEKYEDDRRKSFKKIGSFSLEQLQEYADADLSVVEKLKEIIIQKVDEIYKVYGSSEKLFDADFVLEKSLKKNDAVVAIMKDLLDSVKSFENYIKAFFGEGKETNRDESFYGDFVLAYDILLKVDHIYDAIRNYVTQKPYS

SEQ ID NO: 739 - protein, 1243 aa, synthetic construct
KSLKKNDAVVAIMKDLLDSVKSFENYIKAFFGEGKETNRDESFYGDFVLAYDILLKVDHIYDAIRNYVTQKPYSKDKFKLYFQNPQFMGGWDKDKETDYRATILRYGSKYYLAIMDKKYAKCLQKIDKDDVNGNYEKINYKLLPGPNKMLPKVFFSKKWMAYYNPSEDIQKIYKNGTFKKGDMFNLNDCHKLIDFFKDSISRYPKWSNAYDFNFSETEKYKDIAGFYREVEEQGYKVSFESASKKEVDKLVEEGKLYMFQIYNKDFSDKSHGTPNLHTMYFKLLFDENNHGQIRLSGGAELFMRRASLKKEELVVHPANSPIANKNPDNPKKTTTLSYDVYKDKRFSEDQYELHIPIAINKCPKNIFKINTEVRVLLKHDDNPYVIGIDRGERNLLYIVVVDGKGNIVEQYSLNEIINNFNGIRIKTDYHSLLDKKEKERFEARQNWTSIENIKELKAGYISQVVHKICELVEKYDAVIALEDLNSGFKNSRVKVEKQVYQKFEKMLIDKLNYMVDKKSNPCATGGALKGYQITNKFESFKSMSTQNGFIFYIPAWLTSKIDPSTGFVNLLKTKYTSIADSKKFISSFDRIMYVPEEDLFEFALDYKNFSRTDADYIKKWKLYSYGNRIRIFRNPKKNNVFDWEEVCLTSAYKELFNKYGINYQQGDIRALLCEQSDKAFYSSFMALMSLMLQMRNSITGRTDVDFLISPVKNSDGIFYDSRNYEAQENAILPKNADANGAYNIARKVLWAIGQFKKAEDEKLDKVKIAISNKEWLEYAQTSVKHGSSGSSGSSGSSGSSGSKLEKFTNCYSLSKTLRFKAIPVGKTQENIDNKRLLVEDEKRAEDYKGVKKLLDRYYLSFINDVLHSIKLKNLNNYISLFRKKTRTEKENKELENLEINLRKEIAKAFKGNEGYKSLFKKDIIETILPEFLDDKDEIALVNSFNGFTTAFTGFFRNRENMFSEEAKSTSIAFRCINENLTRYISNMDIFEKVDAIFDKHEVQEIKEKILNSDYDVEDFFEGEFFNFVLTQEGIDVYNAIIGGFVTESGEKIKGLNEYINLYNQKTKQKLPKFKPLYKQVLSDRESLSFYGEGYTSDEEVLEVFRNTLNKNSEIFSSIKKLEKLFKNFDEYSSAGIFVKNGPAISTISKDIFGEWNVIRDKWNAEYDDIHLKKKAVVTEKYEDDRRKSFKKIGSFSLEQLQEYADADLSVVEKLKEIIIQKVDEIYKVYGSSEKLFDADFVLE

SEQ ID NO: 740 - protein, 1243 aa, synthetic construct
SDKAFYSSFMALMSLMLQMRNSITGRTDVDFLISPVKNSDGIFYDSRNYEAQENAILPKNADANGAYNIARKVLWAIGQFKKAEDEKLDKVKIAISNKEWLEYAQTSVKHGSSGSSGSSGSSGSSGSKLEKFTNCYSLSKTLRFKAIPVGKTQENIDNKRLLVEDEKRAEDYKGVKKLLDRYYLSFINDVLHSIKLKNLNNYISLFRKKTRTEKENKELENLEINLRKEIAKAFKGNEGYKSLFKKDIIETILPEFLDDKDEIALVNSFNGFTTAFTGFFRNRENMFSEEAKSTSIAFRCINENLTRYISNMDIFEKVDAIFDKHEVQEIKEKILNSDYDVEDFFEGEFFNFVLTQEGIDVYNAIIGGFVTESGEKIKGLNEYINLYNQKTKQKLPKFKPLYKQVLSDRESLSFYGEGYTSDEEVLEVFRNTLNKNSEIFSSIKKLEKLFKNFDEYSSAGIFVKNGPAISTISKDIFGEWNVIRDKWNAEYDDIHLKKKAVVTEKYEDDRRKSFKKIGSFSLEQLQEYADADLSVVEKLKEIIIQKVDEIYKVYGSSEKLFDADFVLEKSLKKNDAVVAIMKDLLDSVKSFENYIKAFFGEGKETNRDESFYGDFVLAYDILLKVDHIYDAIRNYVTQKPYSKDKFKLYFQNPQFMGGWDKDKETDYRATILRYGSKYYLAIMDKKYAKCLQKIDKDDVNGNYEKINYKLLPGPNKMLPKVFFSKKWMAYYNPSEDIQKIYKNGTFKKGDMFNLNDCHKLIDFFKDSISRYPKWSNAYDFNFSETEKYKDIAGFYREVEEQGYKVSFESASKKEVDKLVEEGKLYMFQIYNKDFSDKSHGTPNLHTMYFKLLFDENNHGQIRLSGGAELFMRRASLKKEELVVHPANSPIANKNPDNPKKTTTLSYDVYKDKRFSEDQYELHIPIAINKCPKNIFKINTEVRVLLKHDDNPYVIGIDRGERNLLYIVVVDGKGNIVEQYSLNEIINNFNGIRIKTDYHSLLDKKEKERFEARQNWTSIENIKELKAGYISQVVHKICELVEKYDAVIALEDLNSGFKNSRVKVEKQVYQKFEKMLIDKLNYMVDKKSNPCATGGALKGYQITNKFESFKSMSTQNGFIFYIPAWLTSKIDPSTGFVNLLKTKYTSIADSKKFISSFDRIMYVPEEDLFEFALDYKNFSRTDADYIKKWKLYSYGNRIRIFRNPKKNNVFDWEEVCLTSAYKELFNKYGINYQQGDIRALLCEQ

SEQ ID NO: 741 - protein, 1227 aa, synthetic construct
SKLEKFTNCYSLSKTLRFKAIPVGKTQENIDNKRLLVEDEKRAEDYKGVKKLLDRYYLSFINDVLHSIKLKNLNNYISLFRKKTRTEKENKELENLEINLRKEIAKAFKGNEGYKSLFKKDIIETILPEFLDDKDEIALVNSFNGFTTAFTGFFRNRENMFSEEAKSTSIAFRCINENLTRYISNMDIFEKVDAIFDKHEVQEIKEKILNSDYDVEDFFEGEFFNFVLTQEGIDVYNAIIGGFVTESGEKIKGLNEYINLYNQKTKQKLPKFKPLYKQVLSDRESLSFYGEGYTSDEEVLEVFRNTLNKNSEIFSSIKKLEKLFKNFDEYSSAGIFVKNGPAISTISKDIFGEWNVIRDKWNAEYDDIHLKKKAVVTEKYEDDRRKSFKKIGSFSLEQLQEYADADLSVVEKLKEIIIQKVDEIYKVYGSSEKLFDADFVLEKSLKKNDAVVAIMKDLLDSVKSFENYIKAFFGEGKETNRDESFYGDFVLAYDILLKVDHIYDAIRNYVTQKPYSKDKFKLYFQNPQFMGGWDKDKETDYRATILRYGSKYYLAIMDKKYAKCLQKIDKDDVNGNYEKINYKLLPGPNKMLPKVFFSKKWMAYYNPSEDIQKIYKNGTFKKGDMFNLNDCHKLIDFFKDSISRYPKWSNAYDFNFSETEKYKDIAGFYREVEEQGYKVSFESASKKEVDKLVEEGKLYMFQIYNKDFSDKSHGTPNLHTMYFKLLFDENNHGQIRLSGGAELFMRRASLKKEELVVHPANSPIANKNPDNPKKTTTLSYDVYKDKRFSEDQYELHIPIAINKCPKNIFKINTEVRVLLKHDDNPYVIGIDRGERNLLYIVVVDGKGNIVEQYSLNEIINNFNGIRIKTDYHSLLDKKEKERFEARQNWTSIENIKELKAGYISQVVHKICELVEKYDAVIALEDLNSGFKNSRVKVEKQVYQKFEKMLIDKLNYMVDKKSNPCATGGALKGYQITNKFESFKSMSTQNGFIFYIPAWLTSKIDPSTGFVNLLKTKYTSIADSKKFISSFDRIMYVPEEDLFEFALDYKNFSRTDADYIKKWKLYSYGNRIRIFRNPKKNNVFDWEEVCLTSAYKELFNKYGINYQQGDIRALLCEQSDKAFYSSFMALMSLMLQMRNSITGRTDVDFLISPVKNSDGIFYDSRNYEAQENAILPKNADANGAYNIARKVLWAIGQFKKAEDEKLDKVKIAISNKEWLEYAQTSVKH

SEQ ID NO: 742 - DNA, 3429 bp, synthetic construct
  source 1..3429: mol_type = other DNA
cgcaccgagaaggagaacaaggagctggagaacctggagatcaacctccgcaaggaaatcgccaaagcgttcaagggcaatgaagggtacaagagcctcttcaagaaagacatcatcgaaactatcctcccagagtttctcgatgacaaggacgagatcgcgctggtgaactcctttaacgggttcacaaccgcgtttaccggcttctttaggaacagggaaaatatgttctccgaggaggccaagtccaccagcatcgccttcaggtgtatcaacgagaacctcacccgctacatttccaatatggacattttcgagaaggtggatgcgatcttcgataagcacgaggtgcaggagatcaaagagaagattctcaattccgattatgacgtcgaggatttcttcgaaggggagttctttaattttgtgctcacacaagagggcattgacgtgtacaacgcgattatcgggggcttcgtcacagagtccggggagaagattaaggggctgaatgagtacatcaatctgtacaatcagaagaccaagcagaaactgccgaaattcaagccgctctacaagcaagtcctgtccgatagggaaagcctctccttctacggcgagggctataccagcgacgaggaggtgctggaagtcttccgcaacacactgaataagaatagcgagattttctcctccatcaagaagctcgagaagctctttaagaactttgacgagtacagctccgccgggattttcgtgaagaacgggccggcgatcagcaccatctccaaggacatctttggcgagtggaacgtcatcagggacaagtggaacgccgagtacgacgacatccacctgaagaagaaggcggtggtgaccgagaagtatgaggacgatcgcaggaagtccttcaaaaaaatcggctccttcagcctcgaacagctccaggagtatgccgatgcggatctgtccgtcgtcgagaagctgaaggaaatcatcattcagaaggtcgacgagatctataaagtgtacgggtccagcgagaagctgttcgacgccgactttgtgctcgagaagtccctcaaaaagaatgacgccgtggtggccattatgaaagacctgctcgactccgtgaagtccttcgaaaattacattaaagcgttctttggggaggggaaggaaactaacagggatgagtccttctatggcgactttgtcctcgcgtacgacatcctgctgaaggtcgaccacatttacgacgcgatccgcaactacgtgacacagaagccgtactccaaagacaagttcaagctgtacttccagaacccgcaatttatggggggctgggacaaggataaagagacagactaccgcgcgacaattctccgctatggctccaaatactatctggccatcatggacaagaagtacgcgaagtgcctgcagaagatcgacaaagacgacgtcaatggcaactatgaaaagatcaactacaagctgctgccgggcccgaacaagatgctcccgaaggtgttcttcagcaagaagtggatggcctactacaatccaagcgaggatattcagaaaatctataaaaacgggaccttcaagaagggggacatgtttaacctcaacgactgccacaagctcattgatttcttcaaggatagcatttcccgctacccgaaatggtccaatgcgtacgattttaacttctccgagacagaaaagtacaaagacatcgcgggcttttacagggaggtggaggagcaagggtataaagtttcttttgaatccgcgagcaagaaggaagtcgacaagctcgtcgaggagggcaagctctacatgttccaaatttataacaaggacttttccgacaagagccatgggaccccaaacctccacaccatgtacttcaaactgctctttgacgagaacaaccacgggcaaatcaggctgagcggcggcgccgaattattcatgcgcagggcctccctcaagaaggaagagctggtcgtccatccagccaattccccgatcgcgaacaagaacccggacaatccgaaaaagaccaccaccctgtcctacgacgtctacaaggacaaacgcttcagcgaagaccagtacgaattacacatcccaattgcgattaataagtgcccaaagaatatcttcaaaattaatacagaggtcagggtgctgctcaaacacgacgacaatccgtatgtcatcggcattgacaggggcgagcgcaatctgctctatatcgtggtcgtggatgggaagggcaatattgtggagcagtactccctgaacgagattatcaacaacttcaatgggattaggattaagaccgactatcacagcctgctcgacaagaaagaaaaagagaggtttgaggcccgccaaaactggacctccattgagaatatcaaagaattaaaggccggctatatttcccaagtcgtccacaagatctgcgagctggtggagaaatatgacgccgtgattgcgctcgaagacttaaattctgggttcaagaactcccgcgtgaaggtggaaaaacaggtgtatcagaaattcgagaaaatgctgatcgacaaactcaattatatggtggataagaagtccaacccgtgtgccacagggggcgcgctgaagggctatcagatcaccaacaagttcgagagcttcaagagcatgagcacccagaacgggtttattttctacatcccggcgtggctcacctccaagattgacccgagcaccggcttcgtgaacctcctgaagacaaagtatacctccattgccgacagcaagaagtttatctcctccttcgaccgcattatgtatgtgccggaggaggacctcttcgagttcgccctcgactacaaaaacttcagccgcacagatgcggattacatcaagaagtggaagctgtactcctacgggaacaggatccgcatcttcaggaatccaaaaaaaaataacgtctttgactgggaggaagtgtgcctgacatccgcctacaaggaactgttcaataaatacggcatcaattaccagcagggcgacattcgcgccctcctctgtgagcagtccgacaaagcgttttactccagcttcatggccctcatgtccctgatgctccaaatgaggaatagcatcacagggcgcaccgacgtcgacttcctcatcagcccggtgaagaactccgacgggatcttttacgactcccgcaactatgaggcgcaagagaatgcgatcctcccgaagaacgccgatgcgaacggggcctataatatcgccaggaaagtgctctgggccatcgggcagttcaaaaaggcggaggatgagaagctcgacaaggtgaaaattgccatttccaacaaggagtggctggagtacgcgcagacctccgtgaagcac

SEQ ID NO: 743 - DNA, 3729 bp, synthetic construct
  source 1..3729: mol_type = other DNA
ggctataccagcgacgaggaggtgctggaagtcttccgcaacacactgaataagaatagcgagattttctcctccatcaagaagctcgagaagctctttaagaactttgacgagtacagctccgccgggattttcgtgaagaacgggccggcgatcagcaccatctccaaggacatctttggcgagtggaacgtcatcagggacaagtggaacgccgagtacgacgacatccacctgaagaagaaggcggtggtgaccgagaagtatgaggacgatcgcaggaagtccttcaaaaaaatcggctccttcagcctcgaacagctccaggagtatgccgatgcggatctgtccgtcgtcgagaagctgaaggaaatcatcattcagaaggtcgacgagatctataaagtgtacgggtccagcgagaagctgttcgacgccgactttgtgctcgagaagtccctcaaaaagaatgacgccgtggtggccattatgaaagacctgctcgactccgtgaagtccttcgaaaattacattaaagcgttctttggggaggggaaggaaactaacagggatgagtccttctatggcgactttgtcctcgcgtacgacatcctgctgaaggtcgaccacatttacgacgcgatccgcaactacgtgacacagaagccgtactccaaagacaagttcaagctgtacttccagaacccgcaatttatggggggctgggacaaggataaagagacagactaccgcgcgacaattctccgctatggctccaaatactatctggccatcatggacaagaagtacgcgaagtgcctgcagaagatcgacaaagacgacgtcaatggcaactatgaaaagatcaactacaagctgctgccgggcccgaacaagatgctcccgaaggtgttcttcagcaagaagtggatggcctactacaatccaagcgaggatattcagaaaatctataaaaacgggaccttcaagaagggggacatgtttaacctcaacgactgccacaagctcattgatttcttcaaggatagcatttcccgctacccgaaatggtccaatgcgtacgattttaacttctccgagacagaaaagtacaaagacatcgcgggcttttacagggaggtggaggagcaagggtataaagtttcttttgaatccgcgagcaagaaggaagtcgacaagctcgtcgaggagggcaagctctacatgttccaaatttataacaaggacttttccgacaagagccatgggaccccaaacctccacaccatgtacttcaaactgctctttgacgagaacaaccacgggcaaatcaggctgagcggcggcgccgaattattcatgcgcagggcctccctcaagaaggaagagctggtcgtccatccagccaattccccgatcgcgaacaagaacccggacaatccgaaaaagaccaccaccctgtcctacgacgtctacaaggacaaacgcttcagcgaagaccagtacgaattacacatcccaattgcgattaataagtgcccaaagaatatcttcaaaattaatacagaggtcagggtgctgctcaaacacgacgacaatccgtatgtcatcggcattgacaggggcgagcgcaatctgctctatatcgtggtcgtggatgggaagggcaatattgtggagcagtactccctgaacgagattatcaacaacttcaatgggattaggattaagaccgactatcacagcctgctcgacaagaaagaaaaagagaggtttgaggcccgccaaaactggacctccattgagaatatcaaagaattaaaggccggctatatttcccaagtcgtccacaagatctgcgagctggtggagaaatatgacgccgtgattgcgctcgaagacttaaattctgggttcaagaactcccgcgtgaaggtggaaaaacaggtgtatcagaaattcgagaaaatgctgatcgacaaactcaattatatggtggataagaagtccaacccgtgtgccacagggggcgcgctgaagggctatcagatcaccaacaagttcgagagcttcaagagcatgagcacccagaacgggtttattttctacatcccggcgtggctcacctccaagattgacccgagcaccggcttcgtgaacctcctgaagacaaagtatacctccattgccgacagcaagaagtttatctcctccttcgaccgcattatgtatgtgccggaggaggacctcttcgagttcgccctcgactacaaaaacttcagccgcacagatgcggattacatcaagaagtggaagctgtactcctacgggaacaggatccgcatcttcaggaatccaaaaaaaaataacgtctttgactgggaggaagtgtgcctgacatccgcctacaaggaactgttcaataaatacggcatcaattaccagcagggcgacattcgcgccctcctctgtgagcagtccgacaaagcgttttactccagcttcatggccctcatgtccctgatgctccaaatgaggaatagcatcacagggcgcaccgacgtcgacttcctcatcagcccggtgaagaactccgacgggatcttttacgactcccgcaactatgaggcgcaagagaatgcgatcctcccgaagaacgccgatgcgaacggggcctataatatcgccaggaaagtgctctgggccatcgggcagttcaaaaaggcggaggatgagaagctcgacaaggtgaaaattgccatttccaacaaggagtggctggagtacgcgcagacctccgtgaagcacggctcctctggcagctccggctctagcggctcctctggcagctccggctccaagctggagaagtttacaaactgttacagcctctccaaaaccctcaggtttaaagcgatcccggtgggcaagacccaggagaacatcgacaacaagaggctcctggtggaagacgagaagcgcgccgaagactacaagggcgtgaagaagctgctcgataggtactacctcagctttattaacgacgtgctgcacagcatcaaactcaagaatctcaacaactacatctccctcttccgcaaaaagacccgcaccgagaaggagaacaaggagctggagaacctggagatcaacctccgcaaggaaatcgccaaagcgttcaagggcaatgaagggtacaagagcctcttcaagaaagacatcatcgaaactatcctcccagagtttctcgatgacaaggacgagatcgcgctggtgaactcctttaacgggttcacaaccgcgtttaccggcttctttaggaacagggaaaatatgttctccgaggaggccaagtccaccagcatcgccttcaggtgtatcaacgagaacctcacccgctacatttccaatatggacattttcgagaaggtggatgcgatcttcgataagcacgaggtgcaggagatcaaagagaagattctcaattccgattatgacgtcgaggatttcttcgaaggggagttctttaattttgtgctcacacaagagggcattgacgtgtacaacgcgattatcgggggcttcgtcacagagtccggggagaagattaaggggctgaatgagtacatcaatctgtacaatcagaagaccaagcagaaactgccgaaattcaagccgctctacaagcaagtcctgtccgatagggaaagcctctccttctacggcgag

SEQ ID NO: 744 - DNA, 3729 bp, synthetic construct
  source 1..3729: mol_type = other DNA
tccgacgggatcttttacgactcccgcaactatgaggcgcaagagaatgcgatcctcccgaagaacgccgatgcgaacggggcctataatatcgccaggaaagtgctctgggccatcgggcagttcaaaaaggcggaggatgagaagctcgacaaggtgaaaattgccatttccaacaaggagtggctggagtacgcgcagacctccgtgaagcacggctcctctggcagctccggctctagcggctcctctggcagctccggctccaagctggagaagtttacaaactgttacagcctctccaaaaccctcaggtttaaagcgatcccggtgggcaagacccaggagaacatcgacaacaagaggctcctggtggaagacgagaagcgcgccgaagactacaagggcgtgaagaagctgctcgataggtactacctcagctttattaacgacgtgctgcacagcatcaaactcaagaatctcaacaactacatctccctcttccgcaaaaagacccgcaccgagaaggagaacaaggagctggagaacctggagatcaacctccgcaaggaaatcgccaaagcgttcaagggcaatgaagggtacaagagcctcttcaagaaagacatcatcgaaactatcctcccagagtttctcgatgacaaggacgagatcgcgctggtgaactcctttaacgggttcacaaccgcgtttaccggcttctttaggaacagggaaaatatgttctccgaggaggccaagtccaccagcatcgccttcaggtgtatcaacgagaacctcacccgctacatttccaatatggacattttcgagaaggtggatgcgatcttcgataagcacgaggtgcaggagatcaaagagaagattctcaattccgattatgacgtcgaggatttcttcgaaggggagttctttaattttgtgctcacacaagagggcattgacgtgtacaacgcgattatcgggggcttcgtcacagagtccggggagaagattaaggggctgaatgagtacatcaatctgtacaatcagaagaccaagcagaaactgccgaaattcaagccgctctacaagcaagtcctgtccgatagggaaagcctctccttctacggcgagggctataccagcgacgaggaggtgctggaagtcttccgcaacacactgaataagaatagcgagattttctcctccatcaagaagctcgagaagctctttaagaactttgacgagtacagctccgccgggattttcgtgaagaacgggccggcgatcagcaccatctccaaggacatctttggcgagtggaacgtcatcagggacaagtggaacgccgagtacgacgacatccacctgaagaagaaggcggtggtgaccgagaagtatgaggacgatcgcaggaagtccttcaaaaaaatcggctccttcagcctcgaacagctccaggagtatgccgatgcggatctgtccgtcgtcgagaagctgaaggaaatcatcattcagaaggtcgacgagatctataaagtgtacgggtccagcgagaagctgttcgacgccgactttgtgctcgagaagtccctcaaaaagaatgacgccgtggtggccattatgaaagacctgctcgactccgtgaagtccttcgaaaattacattaaagcgttctttggggaggggaaggaaactaacagggatgagtccttctatggcgactttgtcctcgcgtacgacatcctgctgaaggtcgaccacatttacgacgcgatccgcaactacgtgacacagaagccgtactccaaagacaagttcaagctgtacttccagaacccgcaatttatggggggctgggacaaggataaagagacagactaccgcgcgacaattctccgctatggctccaaatactatctggccatcatggacaagaagtacgcgaagtgcctgcagaagatcgacaaagacgacgtcaatggcaactatgaaaagatcaactacaagctgctgccgggcccgaacaagatgctcccgaaggtgttcttcagcaagaagtggatggcctactacaatccaagcgaggatattcagaaaatctataaaaacgggaccttcaagaagggggacatgtttaacctcaacgactgccacaagctcattgatttcttcaaggatagcatttcccgctacccgaaatggtccaatgcgtacgattttaacttctccgagacagaaaagtacaaagacatcgcgggcttttacagggaggtggaggagcaagggtataaagtttcttttgaatccgcgagcaagaaggaagtcgacaagctcgtcgaggagggcaagctctacatgttccaaatttataacaaggacttttccgacaagagccatgggaccccaaacctccacaccatgtacttcaaactgctctttgacgagaacaaccacgggcaaatcaggctgagcggcggcgccgaattattcatgcgcagggcctccctcaagaaggaagagctggtcgtccatccagccaattccccgatcgcgaacaagaacccggacaatccgaaaaagaccaccaccctgtcctacgacgtctacaaggacaaacgcttcagcgaagaccagtacgaattacacatcccaattgcgattaataagtgcccaaagaatatcttcaaaattaatacagaggtcagggtgctgctcaaacacgacgacaatccgtatgtcatcggcattgacaggggcgagcgcaatctgctctatatcgtggtcgtggatgggaagggcaatattgtggagcagtactccctgaacgagattatcaacaacttcaatgggattaggattaagaccgactatcacagcctgctcgacaagaaagaaaaagagaggtttgaggcccgccaaaactggacctccattgagaatatcaaagaattaaaggccggctatatttcccaagtcgtccacaagatctgcgagctggtggagaaatatgacgccgtgattgcgctcgaagacttaaattctgggttcaagaactcccgcgtgaaggtggaaaaacaggtgtatcagaaattcgagaaaatgctgatcgacaaactcaattatatggtggataagaagtccaacccgtgtgccacagggggcgcgctgaagggctatcagatcaccaacaagttcgagagcttcaagagcatgagcacccagaacgggtttattttctacatcccggcgtggctcacctccaagattgacccgagcaccggcttcgtgaacctcctgaagacaaagtatacctccattgccgacagcaagaagtttatctcctccttcgaccgcattatgtatgtgccggaggaggacctcttcgagttcgccctcgactacaaaaacttcagccgcacagatgcggattacatcaagaagtggaagctgtactcctacgggaacaggatccgcatcttcaggaatccaaaaaaaaataacgtctttgactgggaggaagtgtgcctgacatccgcctacaaggaactgttcaataaatacggcatcaattaccagcagggcgacattcgcgccctcctctgtgagcagtccgacaaagcgttttactccagcttcatggccctcatgtccctgatgctccaaatgaggaatagcatcacagggcgcaccgacgtcgacttcctcatcagcccggtgaagaac

SEQ ID NO: 745 - DNA, 3729 bp, synthetic construct
  source 1..3729: mol_type = other DNA
aaagacaagttcaagctgtacttccagaacccgcaatttatggggggctgggacaaggataaagagacagactaccgcgcgacaattctccgctatggctccaaatactatctggccatcatggacaagaagtacgcgaagtgcctgcagaagatcgacaaagacgacgtcaatggcaactatgaaaagatcaactacaagctgctgccgggcccgaacaagatgctcccgaaggtgttcttcagcaagaagtggatggcctactacaatccaagcgaggatattcagaaaatctataaaaacgggaccttcaagaagggggacatgtttaacctcaacgactgccacaagctcattgatttcttcaaggatagcatttcccgctacccgaaatggtccaatgcgtacgattttaacttctccgagacagaaaagtacaaagacatcgcgggcttttacagggaggtggaggagcaagggtataaagtttcttttgaatccgcgagcaagaaggaagtcgacaagctcgtcgaggagggcaagctctacatgttccaaatttataacaaggacttttccgacaagagccatgggaccccaaacctccacaccatgtacttcaaactgctctttgacgagaacaaccacgggcaaatcaggctgagcggcggcgccgaattattcatgcgcagggcctccctcaagaaggaagagctggtcgtccatccagccaattccccgatcgcgaacaagaacccggacaatccgaaaaagaccaccaccctgtcctacgacgtctacaaggacaaacgcttcagcgaagaccagtacgaattacacatcccaattgcgattaataagtgcccaaagaatatcttcaaaattaatacagaggtcagggtgctgctcaaacacgacgacaatccgtatgtcatcggcattgacaggggcgagcgcaatctgctctatatcgtggtcgtggatgggaagggcaatattgtggagcagtactccctgaacgagattatcaacaacttcaatgggattaggattaagaccgactatcacagcctgctcgacaagaaagaaaaagagaggtttgaggcccgccaaaactggacctccattgagaatatcaaagaattaaaggccggctatatttcccaagtcgtccacaagatctgcgagctggtggagaaatatgacgccgtgattgcgctcgaagacttaaattctgggttcaagaactcccgcgtgaaggtggaaaaacaggtgtatcagaaattcgagaaaatgctgatcgacaaactcaattatatggtggataagaagtccaacccgtgtgccacagggggcgcgctgaagggctatcagatcaccaacaagttcgagagcttcaagagcatgagcacccagaacgggtttattttctacatcccggcgtggctcacctccaagattgacccgagcaccggcttcgtgaacctcctgaagacaaagtatacctccattgccgacagcaagaagtttatctcctccttcgaccgcattatgtatgtgccggaggaggacctcttcgagttcgccctcgactacaaaaacttcagccgcacagatgcggattacatcaagaagtggaagctgtactcctacgggaacaggatccgcatcttcaggaatccaaaaaaaaataacgtctttgactgggaggaagtgtgcctgacatccgcctacaaggaactgttcaataaatacggcatcaattaccagcagggcgacattcgcgccctcctctgtgagcagtccgacaaagcgttttactccagcttcatggccctcatgtccctgatgctccaaatgaggaatagcatcacagggcgcaccgacgtcgacttcctcatcagcccggtgaagaactccgacgggatcttttacgactcccgcaactatgaggcgcaagagaatgcgatcctcccgaagaacgccgatgcgaacggggcctataatatcgccaggaaagtgctctgggccatcgggcagttcaaaaaggcggaggatgagaagctcgacaaggtgaaaattgccatttccaacaaggagtggctggagtacgcgcagacctccgtgaagcacggctcctctggcagctccggctctagcggctcctctggcagctccggctccaagctggagaagtttacaaactgttacagcctctccaaaaccctcaggtttaaagcgatcccggtgggcaagacccaggagaacatcgacaacaagaggctcctggtggaagacgagaagcgcgccgaagactacaagggcgtgaagaagctgctcgataggtactacctcagctttattaacgacgtgctgcacagcatcaaactcaagaatctcaacaactacatctccctcttccgcaaaaagacccgcaccgagaaggagaacaaggagctggagaacctggagatcaacctccgcaaggaaatcgccaaagcgttcaagggcaatgaagggtacaagagcctcttcaagaaagacatcatcgaaactatcctcccagagtttctcgatgacaaggacgagatcgcgctggtgaactcctttaacgggttcacaaccgcgtttaccggcttctttaggaacagggaaaatatgttctccgaggaggccaagtccaccagcatcgccttcaggtgtatcaacgagaacctcacccgctacatttccaatatggacattttcgagaaggtggatgcgatcttcgataagcacgaggtgcaggagatcaaagagaagattctcaattccgattatgacgtcgaggatttcttcgaaggggagttctttaattttgtgctcacacaagagggcattgacgtgtacaacgcgattatcgggggcttcgtcacagagtccggggagaagattaaggggctgaatgagtacatcaatctgtacaatcagaagaccaagcagaaactgccgaaattcaagccgctctacaagcaagtcctgtccgatagggaaagcctctccttctacggcgagggctataccagcgacgaggaggtgctggaagtcttccgcaacacactgaataagaatagcgagattttctcctccatcaagaagctcgagaagctctttaagaactttgacgagtacagctccgccgggattttcgtgaagaacgggccggcgatcagcaccatctccaaggacatctttggcgagtggaacgtcatcagggacaagtggaacgccgagtacgacgacatccacctgaagaagaaggcggtggtgaccgagaagtatgaggacgatcgcaggaagtccttcaaaaaaatcggctccttcagcctcgaacagctccaggagtatgccgatgcggatctgtccgtcgtcgagaagctgaaggaaatcatcattcagaaggtcgacgagatctataaagtgtacgggtccagcgagaagctgttcgacgccgactttgtgctcgagaagtccctcaaaaagaatgacgccgtggtggccattatgaaagacctgctcgactccgtgaagtccttcgaaaattacattaaagcgttctttggggaggggaaggaaactaacagggatgagtccttctatggcgactttgtcctcgcgtacgacatcctgctgaaggtcgaccacatttacgacgcgatccgcaactacgtgacacagaagccgtactcc

SEQ ID NO: 746 - DNA, 3729 bp, synthetic construct
  source 1..3729: mol_type = other DNA
aagtccctcaaaaagaatgacgccgtggtggccattatgaaagacctgctcgactccgtgaagtccttcgaaaattacattaaagcgttctttggggaggggaaggaaactaacagggatgagtccttctatggcgactttgtcctcgcgtacgacatcctgctgaaggtcgaccacatttacgacgcgatccgcaactacgtgacacagaagccgtactccaaagacaagttcaagctgtacttccagaacccgcaatttatggggggctgggacaaggataaagagacagactaccgcgcgacaattctccgctatggctccaaatactatctggccatcatggacaagaagtacgcgaagtgcctgcagaagatcgacaaagacgacgtcaatggcaactatgaaaagatcaactacaagctgctgccgggcccgaacaagatgctcccgaaggtgttcttcagcaagaagtggatggcctactacaatccaagcgaggatattcagaaaatctataaaaacgggaccttcaagaagggggacatgtttaacctcaacgactgccacaagctcattgatttcttcaaggatagcatttcccgctacccgaaatggtccaatgcgtacgattttaacttctccgagacagaaaagtacaaagacatcgcgggcttttacagggaggtggaggagcaagggtataaagtttcttttgaatccgcgagcaagaaggaagtcgacaagctcgtcgaggagggcaagctctacatgttccaaatttataacaaggacttttccgacaagagccatgggaccccaaacctccacaccatgtacttcaaactgctctttgacgagaacaaccacgggcaaatcaggctgagcggcggcgccgaattattcatgcgcagggcctccctcaagaaggaagagctggtcgtccatccagccaattccccgatcgcgaacaagaacccggacaatccgaaaaagaccaccaccctgtcctacgacgtctacaaggacaaacgcttcagcgaagaccagtacgaattacacatcccaattgcgattaataagtgcccaaagaatatcttcaaaattaatacagaggtcagggtgctgctcaaacacgacgacaatccgtatgtcatcggcattgacaggggcgagcgcaatctgctctatatcgtggtcgtggatgggaagggcaatattgtggagcagtactccctgaacgagattatcaacaacttcaatgggattaggattaagaccgactatcacagcctgctcgacaagaaagaaaaagagaggtttgaggcccgccaaaactggacctccattgagaatatcaaagaattaaaggccggctatatttcccaagtcgtccacaagatctgcgagctggtggagaaatatgacgccgtgattgcgctcgaagacttaaattctgggttcaagaactcccgcgtgaaggtggaaaaacaggtgtatcagaaattcgagaaaatgctgatcgacaaactcaattatatggtggataagaagtccaacccgtgtgccacagggggcgcgctgaagggctatcagatcaccaacaagttcgagagcttcaagagcatgagcacccagaacgggtttattttctacatcccggcgtggctcacctccaagattgacccgagcaccggcttcgtgaacctcctgaagacaaagtatacctccattgccgacagcaagaagtttatctcctccttcgaccgcattatgtatgtgccggaggaggacctcttcgagttcgccctcgactacaaaaacttcagccgcacagatgcggattacatcaagaagtggaagctgtactcctacgggaacaggatccgcatcttcaggaatccaaaaaaaaataacgtctttgactgggaggaagtgtgcctgacatccgcctacaaggaactgttcaataaatacggcatcaattaccagcagggcgacattcgcgccctcctctgtgagcagtccgacaaagcgttttactccagcttcatggccctcatgtccctgatgctccaaatgaggaatagcatcacagggcgcaccgacgtcgacttcctcatcagcccggtgaagaactccgacgggatcttttacgactcccgcaactatgaggcgcaagagaatgcgatcctcccgaagaacgccgatgcgaacggggcctataatatcgccaggaaagtgctctgggccatcgggcagttcaaaaaggcggaggatgagaagctcgacaaggtgaaaattgccatttccaacaaggagtggctggagtacgcgcagacctccgtgaagcacggctcctctggcagctccggctctagcggctcctctggcagctccggctccaagctggagaagtttacaaactgttacagcctctccaaaaccctcaggtttaaagcgatcccggtgggcaagacccaggagaacatcgacaacaagaggctcctggtggaagacgagaagcgcgccgaagactacaagggcgtgaagaagctgctcgataggtactacctcagctttattaacgacgtgctgcacagcatcaaactcaagaatctcaacaactacatctccctcttccgcaaaaagacccgcaccgagaaggagaacaaggagctggagaacctggagatcaacctccgcaaggaaatcgccaaagcgttcaagggcaatgaagggtacaagagcctcttcaagaaagacatcatcgaaactatcctcccagagtttctcgatgacaaggacgagatcgcgctggtgaactcctttaacgggttcacaaccgcgtttaccggcttctttaggaacagggaaaatatgttctccgaggaggccaagtccaccagcatcgccttcaggtgtatcaacgagaacctcacccgctacatttccaatatggacattttcgagaaggtggatgcgatcttcgataagcacgaggtgcaggagatcaaagagaagattctcaattccgattatgacgtcgaggatttcttcgaaggggagttctttaattttgtgctcacacaagagggcattgacgtgtacaacgcgattatcgggggcttcgtcacagagtccggggagaagattaaggggctgaatgagtacatcaatctgtacaatcagaagaccaagcagaaactgccgaaattcaagccgctctacaagcaagtcctgtccgatagggaaagcctctccttctacggcgagggctataccagcgacgaggaggtgctggaagtcttccgcaacacactgaataagaatagcgagattttctcctccatcaagaagctcgagaagctctttaagaactttgacgagtacagctccgccgggattttcgtgaagaacgggccggcgatcagcaccatctccaaggacatctttggcgagtggaacgtcatcagggacaagtggaacgccgagtacgacgacatccacctgaagaagaaggcggtggtgaccgagaagtatgaggacgatcgcaggaagtccttcaaaaaaatcggctccttcagcctcgaacagctccaggagtatgccgatgcggatctgtccgtcgtcgagaagctgaaggaaatcatcattcagaaggtcgacgagatctataaagtgtacgggtccagcgagaagctgttcgacgccgactttgtgctcgag

SEQ ID NO: 747 - DNA, 3729 bp, synthetic construct
  source 1..3729: mol_type = other DNA
tccgacaaagcgttttactccagcttcatggccctcatgtccctgatgctccaaatgaggaatagcatcacagggcgcaccgacgtcgacttcctcatcagcccggtgaagaactccgacgggatcttttacgactcccgcaactatgaggcgcaagagaatgcgatcctcccgaagaacgccgatgcgaacggggcctataatatcgccaggaaagtgctctgggccatcgggcagttcaaaaaggcggaggatgagaagctcgacaaggtgaaaattgccatttccaacaaggagtggctggagtacgcgcagacctccgtgaagcacggctcctctggcagctccggctctagcggctcctctggcagctccggctccaagctggagaagtttacaaactgttacagcctctccaaaaccctcaggtttaaagcgatcccggtgggcaagacccaggagaacatcgacaacaagaggctcctggtggaagacgagaagcgcgccgaagactacaagggcgtgaagaagctgctcgataggtactacctcagctttattaacgacgtgctgcacagcatcaaactcaagaatctcaacaactacatctccctcttccgcaaaaagacccgcaccgagaaggagaacaaggagctggagaacctggagatcaacctccgcaaggaaatcgccaaagcgttcaagggcaatgaagggtacaagagcctcttcaagaaagacatcatcgaaactatcctcccagagtttctcgatgacaaggacgagatcgcgctggtgaactcctttaacgggttcacaaccgcgtttaccggcttctttaggaacagggaaaatatgttctccgaggaggccaagtccaccagcatcgccttcaggtgtatcaacgagaacctcacccgctacatttccaatatggacattttcgagaaggtggatgcgatcttcgataagcacgaggtgcaggagatcaaagagaagattctcaattccgattatgacgtcgaggatttcttcgaaggggagttctttaattttgtgctcacacaagagggcattgacgtgtacaacgcgattatcgggggcttcgtcacagagtccggggagaagattaaggggctgaatgagtacatcaatctgtacaatcagaagaccaagcagaaactgccgaaattcaagccgctctacaagcaagtcctgtccgatagggaaagcctctccttctacggcgagggctataccagcgacgaggaggtgctggaagtcttccgcaacacactgaataagaatagcgagattttctcctccatcaagaagctcgagaagctctttaagaactttgacgagtacagctccgccgggattttcgtgaagaacgggccggcgatcagcaccatctccaaggacatctttggcgagtggaacgtcatcagggacaagtggaacgccgagtacgacgacatccacctgaagaagaaggcggtggtgaccgagaagtatgaggacgatcgcaggaagtccttcaaaaaaatcggctccttcagcctcgaacagctccaggagtatgccgatgcggatctgtccgtcgtcgagaagctgaaggaaatcatcattcagaaggtcgacgagatctataaagtgtacgggtccagcgagaagctgttcgacgccgactttgtgctcgagaagtccctcaaaaagaatgacgccgtggtggccattatgaaagacctgctcgactccgtgaagtccttcgaaaattacattaaagcgttctttggggaggggaaggaaactaacagggatgagtccttctatggcgactttgtcctcgcgtacgacatcctgctgaaggtcgaccacatttacgacgcgatccgcaactacgtgacacagaagccgtactccaaagacaagttcaagctgtacttccagaacccgcaatttatggggggctgggacaaggataaagagacagactaccgcgcgacaattctccgctatggctccaaatactatctggccatcatggacaagaagtacgcgaagtgcctgcagaagatcgacaaagacgacgtcaatggcaactatgaaaagatcaactacaagctgctgccgggcccgaacaagatgctcccgaaggtgttcttcagcaagaagtggatggcctactacaatccaagcgaggatattcagaaaatctataaaaacgggaccttcaagaagggggacatgtttaacctcaacgactgccacaagctcattgatttcttcaaggatagcatttcccgctacccgaaatggtccaatgcgtacgattttaacttctccgagacagaaaagtacaaagacatcgcgggcttttacagggaggtggaggagcaagggtataaagtttcttttgaatccgcgagcaagaaggaagtcgacaagctcgtcgaggagggcaagctctacatgttccaaatttataacaaggacttttccgacaagagccatgggaccccaaacctccacaccatgtacttcaaactgctctttgacgagaacaaccacgggcaaatcaggctgagcggcggcgccgaattattcatgcgcagggcctccctcaagaaggaagagctggtcgtccatccagccaattccccgatcgcgaacaagaacccggacaatccgaaaaagaccaccaccctgtcctacgacgtctacaaggacaaacgcttcagcgaagaccagtacgaattacacatcccaattgcgattaataagtgcccaaagaatatcttcaaaattaatacagaggtcagggtgctgctcaaacacgacgacaatccgtatgtcatcggcattgacaggggcgagcgcaatctgctctatatcgtggtcgtggatgggaagggcaatattgtggagcagtactccctgaacgagattatcaacaacttcaatgggattaggattaagaccgactatcacagcctgctcgacaagaaagaaaaagagaggtttgaggcccgccaaaactggacctccattgagaatatcaaagaattaaaggccggctatatttcccaagtcgtccacaagatctgcgagctggtggagaaatatgacgccgtgattgcgctcgaagacttaaattctgggttcaagaactcccgcgtgaaggtggaaaaacaggtgtatcagaaattcgagaaaatgctgatcgacaaactcaattatatggtggataagaagtccaacccgtgtgccacagggggcgcgctgaagggctatcagatcaccaacaagttcgagagcttcaagagcatgagcacccagaacgggtttattttctacatcccggcgtggctcacctccaagattgacccgagcaccggcttcgtgaacctcctgaagacaaagtatacctccattgccgacagcaagaagtttatctcctccttcgaccgcattatgtatgtgccggaggaggacctcttcgagttcgccctcgactacaaaaacttcagccgcacagatgcggattacatcaagaagtggaagctgtactcctacgggaacaggatccgcatcttcaggaatccaaaaaaaaataacgtctttgactgggaggaagtgtgcctgacatccgcctacaaggaactgttcaataaatacggcatcaattaccagcagggcgacattcgcgccctcctctgtgagcag

SEQ ID NO: 748 - DNA, 3681 bp, synthetic construct
  source 1..3681: mol_type = other DNA
tccaagctggagaagtttacaaactgttacagcctctccaaaaccctcaggtttaaagcgatcccggtgggcaagacccaggagaacatcgacaacaagaggctcctggtggaagacgagaagcgcgccgaagactacaagggcgtgaagaagctgctcgataggtactacctcagctttattaacgacgtgctgcacagcatcaaactcaagaatctcaacaactacatctccctcttccgcaaaaagacccgcaccgagaaggagaacaaggagctggagaacctggagatcaacctccgcaaggaaatcgccaaagcgttcaagggcaatgaagggtacaagagcctcttcaagaaagacatcatcgaaactatcctcccagagtttctcgatgacaaggacgagatcgcgctggtgaactcctttaacgggttcacaaccgcgtttaccggcttctttaggaacagggaaaatatgttctccgaggaggccaagtccaccagcatcgccttcaggtgtatcaacgagaacctcacccgctacatttccaatatggacattttcgagaaggtggatgcgatcttcgataagcacgaggtgcaggagatcaaagagaagattctcaattccgattatgacgtcgaggatttcttcgaaggggagttctttaattttgtgctcacacaagagggcattgacgtgtacaacgcgattatcgggggcttcgtcacagagtccggggagaagattaaggggctgaatgagtacatcaatctgtacaatcagaagaccaagcagaaactgccgaaattcaagccgctctacaagcaagtcctgtccgatagggaaagcctctccttctacggcgagggctataccagcgacgaggaggtgctggaagtcttccgcaacacactgaataagaatagcgagattttctcctccatcaagaagctcgagaagctctttaagaactttgacgagtacagctccgccgggattttcgtgaagaacgggccggcgatcagcaccatctccaaggacatctttggcgagtggaacgtcatcagggacaagtggaacgccgagtacgacgacatccacctgaagaagaaggcggtggtgaccgagaagtatgaggacgatcgcaggaagtccttcaaaaaaatcggctccttcagcctcgaacagctccaggagtatgccgatgcggatctgtccgtcgtcgagaagctgaaggaaatcatcattcagaaggtcgacgagatctataaagtgtacgggtccagcgagaagctgttcgacgccgactttgtgctcgagaagtccctcaaaaagaatgacgccgtggtggccattatgaaagacctgctcgactccgtgaagtccttcgaaaattacattaaagcgttctttggggaggggaaggaaactaacagggatgagtccttctatggcgactttgtcctcgcgtacgacatcctgctgaaggtcgaccacatttacgacgcgatccgcaactacgtgacacagaagccgtactccaaagacaagttcaagctgtacttccagaacccgcaatttatggggggctgggacaaggataaagagacagactaccgcgcgacaattctccgctatggctccaaatactatctggccatcatggacaagaagtacgcgaagtgcctgcagaagatcgacaaagacgacgtcaatggcaactatgaaaagatcaactacaagctgctgccgggcccgaacaagatgctcccgaaggtgttcttcagcaagaagtggatggcctactacaatccaagcgaggatattcagaaaatctataaaaacgggaccttcaagaagggggacatgtttaacctcaacgactgccacaagctcattgatttcttcaaggatagcatttcccgctacccgaaatggtccaatgcgtacgattttaacttctccgagacagaaaagtacaaagacatcgcgggcttttacagggaggtggaggagcaagggtataaagtttcttttgaatccgcgagcaagaaggaagtcgacaagctcgtcgaggagggcaagctctacatgttccaaatttataacaaggacttttccgacaagagccatgggaccccaaacctccacaccatgtacttcaaactgctctttgacgagaacaaccacgggcaaatcaggctgagcggcggcgccgaattattcatgcgcagggcctccctcaagaaggaagagctggtcgtccatccagccaattccccgatcgcgaacaagaacccggacaatccgaaaaagaccaccaccctgtcctacgacgtctacaaggacaaacgcttcagcgaagaccagtacgaattacacatcccaattgcgattaataagtgcccaaagaatatcttcaaaattaatacagaggtcagggtgctgctcaaacacgacgacaatccgtatgtcatcggcattgacaggggcgagcgcaatctgctctatatcgtggtcgtggatgggaagggcaatattgtggagcagtactccctgaacgagattatcaacaacttcaatgggattaggattaagaccgactatcacagcctgctcgacaagaaagaaaaagagaggtttgaggcccgccaaaactggacctccattgagaatatcaaagaattaaaggccggctatatttcccaagtcgtccacaagatctgcgagctggtggagaaatatgacgccgtgattgcgctcgaagacttaaattctgggttcaagaactcccgcgtgaaggtggaaaaacaggtgtatcagaaattcgagaaaatgctgatcgacaaactcaattatatggtggataagaagtccaacccgtgtgccacagggggcgcgctgaagggctatcagatcaccaacaagttcgagagcttcaagagcatgagcacccagaacgggtttattttctacatcccggcgtggctcacctccaagattgacccgagcaccggcttcgtgaacctcctgaagacaaagtatacctccattgccgacagcaagaagtttatctcctccttcgaccgcattatgtatgtgccggaggaggacctcttcgagttcgccctcgactacaaaaacttcagccgcacagatgcggattacatcaagaagtggaagctgtactcctacgggaacaggatccgcatcttcaggaatccaaaaaaaaataacgtctttgactgggaggaagtgtgcctgacatccgcctacaaggaactgttcaataaatacggcatcaattaccagcagggcgacattcgcgccctcctctgtgagcagtccgacaaagcgttttactccagcttcatggccctcatgtccctgatgctccaaatgaggaatagcatcacagggcgcaccgacgtcgacttcctcatcagcccggtgaagaactccgacgggatcttttacgactcccgcaactatgaggcgcaagagaatgcgatcctcccgaagaacgccgatgcgaacggggcctataatatcgccaggaaagtgctctgggccatcgggcagttcaaaaaggcggaggatgagaagctcgacaaggtgaaaattgccatttccaacaaggagtggctggagtacgcgcagacctccgtgaagcac

SEQ ID NO: 749 - DNA, 15555 bp, synthetic construct
  source 1..15555: mol_type = other DNA
aaggatccctgaaagcgacgttggatgttaacatctacaaattgccttttcttatcgaccatgtacgtaagcgcttacgtttttggtggacccttgaggaaactggtagctgttgtgggcctgtggactcaagatggatcattaatttccaccttcacctacgatggggggcatcgcaccggtgagtaatattgtacggctaagagcgaatttggcctgtagacctcaattgcgagctttctaatttcaaactattcgggcctaacttttggtgtgatgatgctgactggcaggatatataccgttgtaatttgagctcgtgtgaataagtcgctgtgtatgtttgtttgattgtttctgttggagtgcagcccatttcaccggacaagtcggctagattgatttagccctgatgaactgccgaggggaagccatcttgagcgcggaatgggaatggatttcgttgtacaacgacacgacagaacacccacgggaccgagcttcgaagctttaacgcttgagttaagccgcgccgcgaagcggcgtcggcttgaacgaattgttagacatcagaagaactcgtcaagaaggcgatagaaggcgatgcgctgcgaatcgggagcggcgataccgtaaagcacgaggaagcggtcagcccattcgccgccaagctcttcagcaatatcacgggtagccaacgctatgtcctgatagcggtccgccacacccagccggccacagtcgatgaatccagaaaagcggccattttccaccatgatattcggcaagcaggcatcgccatgggtcacgacgagatcctcgccgtcgggcatgcgcgccttgagcctggcgaacagttcggctggcgcgagcccctgatgctcttcgtccagatcatcctgatcgacaagaccggcttccatccgagtacgtgctcgctcgatgcgatgtttcgcttggtggtcgaatgggcaggtagccggatcaagcgtatgcagccgccgcattgcatcagccatgatggatactttctcggcaggagcaaggtgagatgacaggagatcctgccccggcacttcgcccaatagcagccagtcccttcccgcttcagtgacaacgtcgagcacagctgcgcaaggaacgcccgtcgtggccagccacgatagccgcgctgcctcgtcctgcagttcattcagggcaccggacaggtcggtcttgacaaaaagaaccgggcgcccctgcgctgacagccggaacacggcggcatcagagcagccgattgtctgttgtgcccagtcatagccgaatagcctctccacccaagcggccggagaacctgcgtgcaatccatcttgttcaatcatggctttgtttctccttcaatcattgactattgtcacgttattctgaatcgacgagaactcacatcaatctcaacaagcatctctgctcgcgaaattggtgttgtctcattaaaacgtgaccgtcaaagtctattcactaggacccaaatctctccaggtcccgcaagctagcttcgccgcccacgtttctctttcttctcatattcaattgtcaaaaaacagacctcatgaccaaaatcccttaacgtgagttttcgttccactgagcgtcagaccccgtagaaaagatcaaaggatcttcttgagatcctttttttctgcgcgtaatctgctgcttgcaaacaaaaaaaccaccgctaccagcggtggtttgtttgccggatcaagagctaccaactttttttccgaaggtaactggcttcagcagagcgcagataccaaatactgtccttctagtgtagccgtagttaggccaccacttcaagaactctgtagcaccgcctacatacctcgctctgctaatcctgttaccagtggctgctgccagtggcgataagtcgtgtcttaccgggttggactcaagacgatagttaccggataaggcgcagcggtcgggctgaacggggggttcgtgcacacagcccagcttggagcgaacgacctacaccgaactgagatacctacagcgtgagctatgagaaagcgccacgcttcccgaagggagaaaggcggacaggtatccggtaagcggcagggtcggaacaggagagcgcacgagggagcttccagggggaaacgcctggtatctttatagtcctgtcgggtttcgccacctctgacttgagcgtcgatttttgtgatgctcgtcaggggggcggagcctatggaaaaacgccagcaacgcggcctttttacggttcctggccttttgctggccttttgctcacatgttctttcctgcgttatcccctgattctgtggataaccgtattaccgcctttgagtgagctgataccgctcgccgcagccgaacgaccgagcgcagcgagtcagtgagcgaggaagcggaagagcgcctgatgcggtattttctccttacgcatctgtgcggtatttcacaccgcatatggtgcactctcagtacaatctgctctgatgccgcatagttaagccagtatacaggctctccttcacgatcaacgatcggcatggggccttcgtgcttgttgagtaatgttatcgctcccatcagagcacgcttggtactccgggaatcggatggtctgtcgatcatccaaaaaacgctcatgttttcaacctattaggtctgtggtcagctgaccacagaccatcctgctccatactcgctaattctagccaaaccgcaacgtcccctgcccgctagccttcaagagcgccattatcatcgggccaagtgaaaacttcccgagctcgctccgccgtgtcagatctcggagatagcccccgggcgaattgatgaagttcgctcgctccaaaatgcacgccatcgctgctgccgcattctccggtcccattgcctcacacgcgtcttggtaagccgacgggctgacccccagcatagaccgaaccaccaccgcagccgacatgaggtcacgccagctagcaaccgcaccgctcggcccataattgccaatggtcgggcatgctttcaggatcatcccgagggggaacgcttttatcggctcgctccttgcccggtctatttcactcggcttagcgccctgctccttttcagagcgaggttcaagttcattaacggattcgggttttgaattctgtatgtgctgctcgctctgggcagcattggtgctattattttctgaattgtctctaatttccaaccggttgattatctcttcctggagcatccacatctcttcgagaattgactctacatcagcaagcgtcggggcgcgtggaattctacccacaagttccacatagacttcctcgacagcttgccagtcgccctccgctccctcttccatagctgccgtaattagcttccgaacgtcccgtcggcaaatcgtcagactttctttggccatcctgaatgctgctcgatcggccatcacttgctgtgccatcatcgctagctcttcggaccgcgcgagaagcggagacaaatcgaagccaaacgcgcgctcgatctgaccagcgccatccttacgagcgtaacgctttccgttggcgctatccttccggacgatcaagcctgactccacgagcatggcgatgtgcctacgcaaagtcgcgccagccatcccatgcgcccgaagggcaagctgagcattcgacgggaagacgatcagctgtgcctcctgacgcaactccgtttccgggtgaaagctcaatagcgcatcaaggacggcaagactgttggactggattccaagtagttccatggccgcggacgcatctctaaagaccttccacttgtccgctgtcttgccttgtttgatatcggccagcgccgtctggcgccgcacaagcgcaagcgtcattggccgccgcccgaatggcgtcgttacacttcctgtctgcatcatctttcacctttcagcaggcaaaggaaatcagctcaccaaaacggcgctaaaaactcttgacgaggattcgaggaaatgcgattctgttcgcgctagagagacagaagggcttccgcgacggcgacgttgagggggctcttttcttttgcggtttactctccccgtttccgttggttctcagcgtggtacgcttgatacagcgctggcacatgatcgagcacgaaggtcgcaaaatcgggcgtcgccttcctgtcaatcgtgatttccagtttggccttgctctgcgtcacctgtgcaattctggtgccgtctggggtggccatgacctcgggaagtccacgcgcaacccgactgggcttcagactagcgatcaccgccttgaatcgttctgccgatggcagcgcttgaacttcctccgacatagcatatttagccacgtcggccggtgaagaaactttctcaatcagctcggcaagttgttgccaactcggccgtccaacaccaggagcggcaccaatagcatcggtcagttcagaggggagggcgtcgacgagcagaagcatcttggacaaattgctcttgtcgatcgacatcgcggcgatgacaatctctcgagaaaactgcctgttcaggcgatgtgcgaagcgcgccttttcgatgaaggtaagatcttcgcgctcattgttttcctgaccctgtgctacgaccacttgctcgtccgtcagttcgcgaacgaccgctctgaccggaagtccgagttctgaaacggcgcgtagccggcggtggccgaaggcaacctgatatcggcccggctggctcggatgcggtcgcacaaggattgggacttgctgtccttgttcccggatcgaagtaaggagcccgtcaatgtcccctcgcatacgatcctgcacgaaagacggttctattgacgaggcatccaactctatcactgcctgaccttcagcgaggcgccgctcgatctcttcggcacggctaagacgatcgttttgctctcgcagtgcgttaccaatgttcgctgtgagcttcgttgccggatcgcgctccttccttgttacgccgaggagcggcatggagcggttctttgccgtcctattgtcggcgggcgacgtttcaggggcgtcagttgacacgccaaggatgtgcttccggctcatgtgggcctaccccatgcttttttgatcagtgtttcgatctcgtcgttgacggcgttcatcgcctccaaggctcgatcataggtcgagcgcgtgaacaggccacgctccacttcgaatagagtctggtttgtcaggccagcgtccgaaaccgcggtggttttaagcatcggaaaattgaggacattttcgccaaaaatcgaccgcagataacctaccatttggttctgtggtccgtcgctcggttcgaaacgggttatcagatagcgcatccaattaaacttgaacttggcgccagcattctcgatttcacgcaaaaggttcgatgtcattgccagaaactggttcatcgacatcacatccagcatctgcggatggaccgtgacaagaatggacgtcgccgcagtcaatgcggatagcgtgagatacccaagctggggagggcagtcgatgaccacgacgtcatagttatccgcgatatcttcaattacttggctgatgcgaccataaaagagcgtgtcgccctctttgcggttcatcagcgcgcgtggcgtatcgtgttcaaactccatcagctcaaggttaccaggaatcaggtggaggtcgggaatgtaagtccctcggacgactcgttcgattgccacttgctcatcatcataccttatagcgccgtagagcgtttcgttcgggccaacgtccgtttccggttggctcccaaagagtgcagaaaggctcgcttgaggatcgagatcaatggccaagactcgatatccgcgcatagcgaggtactgcgccagatgcgcggcggtggtggtcttacccgacccacctttgaaattcatcacagagataacctgaagctgctcgccgcctcgacgatgtggcaggtagcgccggttcccgcggccgacctgatccatatacttccgaatcacatggatatcttcaattgagaacattcgcctgccacccgggctcatgctaacattcaactctggcatctcagacgcggtctgccgtaaatatgactcgccaacgccgagcagcttggacgcctccgatggcccgaatgttcgaatgcccttctcggaatgcggcgggaaaaccttaagatgatgtgcttgaagttggctcgagagggcatcggcatgacgctccatcaaggccgtcaaccctacaactacaggcgctgcttttaggacagacttcgccatctcaaacccattccttgccagtggcgatatttttcgcgaaactggaaaagttccgccgctggcaattagcgccgattctgctgtttgggcaagagcttttaggttaacagaaggttaacgccctcaggtcgaaaaactccacccaactgttatttgtatttatttccaatgccttagagagattgccatttgaatatgttcatgtattgttttagtgataatcctacaatcgtaacccaaaaagaggtcgccctctgcgcgccgtcgtccaatataggcgaagtcacccttgcgactcaggcggattctaccttgtacacgtgtcgagtggaaaagtcccatgtggatcactccgttgccccgtcgctcaccgtgttggggggaaggtgcacatggctcagttctcaatggaaattatctgcctaaccggctcagttctgcgtagaaaccaacatgcaagctccaccgggtgcaaagcggcagcggcggcaggatatattcaattgtaaatggcttcatgtccgggaaatctacatggatcagcaatgagtatgatggtcaatatggagaaaaagaaagagtaattaccaattttttttcaattcaaaaatgtagatgtccgcagcgttattataaaatgaaagtacattttgataaaacgacaaattacgatccgtcgtatttataggcgaaagcaataaacaaattattctaattcggaaatctttatttcgacgtgtctacattcacgtccaaatgggggcttagatgagaaacttcacgatcgatgcggccctgccggcgcgccactagtcaacaattggccaatctttgttctaaattgctaataaacgaccatttccgtcaattctccttggttgcaacagtctacccgtcaaatgtttactaatttataagtgtgaagtttgaattatgaaagacgaaatcgtattaaaaattcacaagaataaacaactccatagattttcaaaaaaacagtcacgagaaaaaaaccacagtccgtttgtctgctcttctagtttttattatttttctattaatagttttttgttatttcgagaataaaatttgaacgatgtccgaaccacaaaagccgagccgataaatcctaagccgagcctaactttagccgtaaccatcagtcacggctcccgggctaattcatttgaaccgaatcataatcaacggtttagatcaaactcaaaacaatctaacggcaacatagacgcgtcggtgagctaaaaagagtgtgaaagccaggtcaccatagcattgtctctcccagattttttatttgggaaataatagaagaaatagaaaaaaataaaagagtgagaaaaatcgtagagctatatattcgcacatgtactcgtttcgctttccttagtgttagctgctgccgctgttgtttctcctccatttctctatctttctctctcgctgcttctcgaatcttctgtatcatcttcttcttcttcaaggtgagtctctagatccgttcgcttgattttgctgctcgttagtcgttattgttgattctctatgccgatttcgctagatctgtttagcatgcgttgtggttttatgagaaaatctttgttttgggggttgcttgttatgtgattcgatccgtgcttgttggatcgatctgagctaattcttaaggtttatgtgttagatctatggagtttgaggattcttctcgcttctgtcgatctctcgctgttatttttgtttttttcagtgaagtgaagttgtttagttcgaaatgacttcgtgtatgctcgattgatctggttttaatcttcgatctgttaggtgttgatgtttacaagtgaattctagtgttttctcgttgagatctgtgaagtttgaacctagttttctcaataatcaacatatgaagcgatgtttgagtttcaataaacgctgctaatcttcgaaactaagttgtgatctgattcgtgtttacttcatgagcttatccaattcatttcggtttcattttactttttttttagtgaaccatggcgcaagttagcagaatctgcaatggtgtgcagaacccatctcttatctccaatctctcgaaatccagtcaacgcaaatctcccttatcggtttctctgaagacgcagcagcatccacgagcttatccgatttcgtcgtcgtggggattgaagaagagtgggatgacgttaattggctctgagcttcgtcctcttaaggtcatgtcttctgtttccacggcgtgcatgggggaagcggtgatcgccgaagtatcgactcaactatcagaggtagttggcgtcatcgagcgccatctcgaaccgacgttgctggccgtacatttgtacggctccgcagtggatggcggcctgaagccacacagtgatattgatttgctggttacggtgaccgtaaggcttgatgaaacaacgcggcgagctttgatcaacgaccttttggaaacttcggcttcccctggagagagcgagattctccgcgctgtagaagtcaccattgttgtgcacgacgacatcattccgtggcgttatccagctaagcgcgaactgcaatttggagaatggcagcgcaatgacattcttgcaggtatcttcgagccagccacgatcgacattgatctggctatcttgctgacaaaagcaagagaacatagcgttgccttggtaggtccagcggcggaggaactctttgatccggttcctgaacaggatctatttgaggcgctaaatgaaaccttaacgctatggaactcgccgcccgactgggctggcgatgagcgaaatgtagtgcttacgttgtcccgcatttggtacagcgcagtaaccggcaaaatcgcgccgaaggatgtcgctgccgactgggcaatggagcgcctgccggcccagtatcagcccgtcatacttgaagctagacaggcttatcttggacaagaagaagatcgcttggcctcgcgcgcagatcagttggaagaatttgtccactacgtgaaaggcgagatcaccaaggtagtcggcaaataaggatcaattcccgatcgttcaaacatttggcaataaagtttcttaagattgaatcctgttgccggtcttgcgatgattatcatataatttctgttgaattacgttaagcatgtaataattaacatgtaatgcatgacgttatttatgagatgggtttttatgattagagtcccgcaattatacatttaatacgcgatagaaaacaaaatatagcgcgcaaactaggataaattatcgcgcgcggtgtcatctatgttactagatcacgcgtgtatgcaatatcctgcagggtattaattaattatgccctaagacatcctggaccaatatgctgaagattatgctacctacaccaggataggacttgaagcacttaaccttgaagattggttcgaagaaccagaacccgatccacctaaccctgtggaccgccagaggatagaggacatcctggacctactgaacgtcagcaatgacgactgaaagattcccaggacaccggcggaagtggtggacccagtctaggtgcgatgcttagtcgcgcacgatgactatgtcggaaggcatctttgctttcggcaaactttagtaatactttaaggaaagtattgtacaagttaggtgcagagacaataatgcacccagctttagctttgtttatggaattattgtgtcggttgcattattggatgcctgcgtgcaccctaagcaatcaacggagaaacaaagataaaaatcaattactcacatgaaagagtattgatcacgagtcactatggagcgacaatctccagacaggatgtcagcatcttatcttcctttgaagaaagcatcatcaataacgatgtaatggtggggacatccactaagttattgctctgcaaacagctcaaaaagctactggccgacaatcataattgctcggcatgtccaggtggggcctccactagcaataatacaagctttacagcttgcagtgactcatcctccaataatggagaaaaagacgtcagcagtgacgaacaagggtcgaaagacttgcctatataagggcattctcccctcagttgaagatcatcgaaagttggagcaataaactctctcttcaacaaatctatcttttatcttttatcgccgcaatggcgggatctaagaagagaagaattaaacaagatcgcaccgagaaggagaacaaggagctggagaacctggagatcaacctccgcaaggaaatcgccaaagcgttcaagggcaatgaagggtacaagagcctcttcaagaaagacatcatcgaaactatcctcccagagtttctcgatgacaaggacgagatcgcgctggtgaactcctttaacgggttcacaaccgcgtttaccggcttctttaggaacagggaaaatatgttctccgaggaggccaagtccaccagcatcgccttcaggtgtatcaacgagaacctcacccgctacatttccaatatggacattttcgagaaggtggatgcgatcttcgataagcacgaggtgcaggagatcaaagagaagattctcaattccgattatgacgtcgaggatttcttcgaaggggagttctttaattttgtgctcacacaagagggcattgacgtgtacaacgcgattatcgggggcttcgtcacagagtccggggagaagattaaggggctgaatgagtacatcaatctgtacaatcagaagaccaagcagaaactgccgaaattcaagccgctctacaagcaagtcctgtccgatagggaaagcctctccttctacggcgagggctataccagcgacgaggaggtgctggaagtcttccgcaacacactgaataagaatagcgagattttctcctccatcaagaagctcgagaagctctttaagaactttgacgagtacagctccgccgggattttcgtgaagaacgggccggcgatcagcaccatctccaaggacatctttggcgagtggaacgtcatcagggacaagtggaacgccgagtacgacgacatccacctgaagaagaaggcggtggtgaccgagaagtatgaggacgatcgcaggaagtccttcaaaaaaatcggctccttcagcctcgaacagctccaggagtatgccgatgcggatctgtccgtcgtcgagaagctgaaggaaatcatcattcagaaggtcgacgagatctataaagtgtacgggtccagcgagaagctgttcgacgccgactttgtgctcgagaagtccctcaaaaagaatgacgccgtggtggccattatgaaagacctgctcgactccgtgaagtccttcgaaaattacattaaagcgttctttggggaggggaaggaaactaacagggatgagtccttctatggcgactttgtcctcgcgtacgacatcctgctgaaggtcgaccacatttacgacgcgatccgcaactacgtgacacagaagccgtactccaaagacaagttcaagctgtacttccagaacccgcaatttatggggggctgggacaaggataaagagacagactaccgcgcgacaattctccgctatggctccaaatactatctggccatcatggacaagaagtacgcgaagtgcctgcagaagatcgacaaagacgacgtcaatggcaactatgaaaagatcaactacaagctgctgccgggcccgaacaagatgctcccgaaggtgttcttcagcaagaagtggatggcctactacaatccaagcgaggatattcagaaaatctataaaaacgggaccttcaagaagggggacatgtttaacctcaacgactgccacaagctcattgatttcttcaaggatagcatttcccgctacccgaaatggtccaatgcgtacgattttaacttctccgagacagaaaagtacaaagacatcgcgggcttttacagggaggtggaggagcaagggtataaagtttcttttgaatccgcgagcaagaaggaagtcgacaagctcgtcgaggagggcaagctctacatgttccaaatttataacaaggacttttccgacaagagccatgggaccccaaacctccacaccatgtacttcaaactgctctttgacgagaacaaccacgggcaaatcaggctgagcggcggcgccgaattattcatgcgcagggcctccctcaagaaggaagagctggtcgtccatccagccaattccccgatcgcgaacaagaacccggacaatccgaaaaagaccaccaccctgtcctacgacgtctacaaggacaaacgcttcagcgaagaccagtacgaattacacatcccaattgcgattaataagtgcccaaagaatatcttcaaaattaatacagaggtcagggtgctgctcaaacacgacgacaatccgtatgtcatcggcattgacaggggcgagcgcaatctgctctatatcgtggtcgtggatgggaagggcaatattgtggagcagtactccctgaacgagattatcaacaacttcaatgggattaggattaagaccgactatcacagcctgctcgacaagaaagaaaaagagaggtttgaggcccgccaaaactggacctccattgagaatatcaaagaattaaaggccggctatatttcccaagtcgtccacaagatctgcgagctggtggagaaatatgacgccgtgattgcgctcgaagacttaaattctgggttcaagaactcccgcgtgaaggtggaaaaacaggtgtatcagaaattcgagaaaatgctgatcgacaaactcaattatatggtggataagaagtccaacccgtgtgccacagggggcgcgctgaagggctatcagatcaccaacaagttcgagagcttcaagagcatgagcacccagaacgggtttattttctacatcccggcgtggctcacctccaagattgacccgagcaccggcttcgtgaacctcctgaagacaaagtatacctccattgccgacagcaagaagtttatctcctccttcgaccgcattatgtatgtgccggaggaggacctcttcgagttcgccctcgactacaaaaacttcagccgcacagatgcggattacatcaagaagtggaagctgtactcctacgggaacaggatccgcatcttcaggaatccaaaaaaaaataacgtctttgactgggaggaagtgtgcctgacatccgcctacaaggaactgttcaataaatacggcatcaattaccagcagggcgacattcgcgccctcctctgtgagcagtccgacaaagcgttttactccagcttcatggccctcatgtccctgatgctccaaatgaggaatagcatcacagggcgcaccgacgtcgacttcctcatcagcccggtgaagaactccgacgggatcttttacgactcccgcaactatgaggcgcaagagaatgcgatcctcccgaagaacgccgatgcgaacggggcctataatatcgccaggaaagtgctctgggccatcgggcagttcaaaaaggcggaggatgagaagctcgacaaggtgaaaattgccatttccaacaaggagtggctggagtacgcgcagacctccgtgaagcacggctcctctggcagctccggctctagcggctcctctggcagctccggctccaagctggagaagtttacaaactgttacagcctctccaaaaccctcaggtttaaagcgatcccggtgggcaagacccaggagaacatcgacaacaagaggctcctggtggaagacgagaagcgcgccgaagactacaagggcgtgaagaagctgctcgataggtactacctcagctttattaacgacgtgctgcacagcatcaaactcaagaatctcaacaactacatctccctcttccgcaaaaagaccggatctaagaagagaagaattaaacaagattgatagaagggctctctgtcatgatttcatactttcattattgagctctgtaattacaattatgaccatgagaacatctcttattgtgtggccttttaattgctgatgttagtactgaaccaaagcttatcgtgatgatgtaaaagcaataagtacttgtttgtagcttctttgtgtctccctttgggcttaatacatctgtttagtgttgtggctttggcatagacttctcttggtaataatgccttgcaatgcaaaatttcaattatcaaattctattatgttctcaccttatggtaacagcttaccctgtggaagatgagattcttgagttgagtcattgccaatttttggcattagcttttgaattagtgaattttgacaaaaattaccgtgacactgattttgttgaagctcttaagtgtagtttttacaaaatttcagtggctcgttgtgattatgtcaaactcacggcgaatgtagttcttacagaatttcagtggctcaaggatttaacgcgtgtatgcggccgcaaactatttaaatgcaggcgataaaaatgttttaaacgatatatattataaaaaaaaacgtttcaaaaataaatacaaaaatgtttttaaatatatataatttaactcattaaagaaaataaaaatgcaagtgcggtgacaagacaagctaaaagttgcaaaagaaatggcagggctataaggctcacctactcctggatttaccaaattttggttcgtccctatactcgaaaaataaaacaaaataaatttcagtatcttcgtttttgtatgctttgactgtgaggcgaggccaactttcttcttctgtctgagatgaattttgtttgcctcctgtgaaggatgtatcattcaaagtgaatgttttgcaactgccagtagtcccacatcgaccaaatattcttattacagtgtgtttatatagcacctggagaaggaatgggttgtttcaaagattaaataatttctactaagtgtagatcaagggactcaacatcaaaggattaatttctactaagtgtagatcaagggactcaacatcaaaggattaatttctactaagtgtagatcaagggactcaacatcaaaggattaatttctactaagtgtagatttttttttgcggccgcaacagagaaactagacctgcaggaaggcgccggcgctctcttaaggtagc

SEQ ID NO: 750 - DNA, 15555 bp, synthetic construct
  source 1..15555: mol_type = other DNA
aaggatccctgaaagcgacgttggatgttaacatctacaaattgccttttcttatcgaccatgtacgtaagcgcttacgtttttggtggacccttgaggaaactggtagctgttgtgggcctgtggactcaagatggatcattaatttccaccttcacctacgatggggggcatcgcaccggtgagtaatattgtacggctaagagcgaatttggcctgtagacctcaattgcgagctttctaatttcaaactattcgggcctaacttttggtgtgatgatgctgactggcaggatatataccgttgtaatttgagctcgtgtgaataagtcgctgtgtatgtttgtttgattgtttctgttggagtgcagcccatttcaccggacaagtcggctagattgatttagccctgatgaactgccgaggggaagccatcttgagcgcggaatgggaatggatttcgttgtacaacgacacgacagaacacccacgggaccgagcttcgaagctttaacgcttgagttaagccgcgccgcgaagcggcgtcggcttgaacgaattgttagacatcagaagaactcgtcaagaaggcgatagaaggcgatgcgctgcgaatcgggagcggcgataccgtaaagcacgaggaagcggtcagcccattcgccgccaagctcttcagcaatatcacgggtagccaacgctatgtcctgatagcggtccgccacacccagccggccacagtcgatgaatccagaaaagcggccattttccaccatgatattcggcaagcaggcatcgccatgggtcacgacgagatcctcgccgtcgggcatgcgcgccttgagcctggcgaacagttcggctggcgcgagcccctgatgctcttcgtccagatcatcctgatcgacaagaccggcttccatccgagtacgtgctcgctcgatgcgatgtttcgcttggtggtcgaatgggcaggtagccggatcaagcgtatgcagccgccgcattgcatcagccatgatggatactttctcggcaggagcaaggtgagatgacaggagatcctgccccggcacttcgcccaatagcagccagtcccttcccgcttcagtgacaacgtcgagcacagctgcgcaaggaacgcccgtcgtggccagccacgatagccgcgctgcctcgtcctgcagttcattcagggcaccggacaggtcggtcttgacaaaaagaaccgggcgcccctgcgctgacagccggaacacggcggcatcagagcagccgattgtctgttgtgcccagtcatagccgaatagcctctccacccaagcggccggagaacctgcgtgcaatccatcttgttcaatcatggctttgtttctccttcaatcattgactattgtcacgttattctgaatcgacgagaactcacatcaatctcaacaagcatctctgctcgcgaaattggtgttgtctcattaaaacgtgaccgtcaaagtctattcactaggacccaaatctctccaggtcccgcaagctagcttcgccgcccacgtttctctttcttctcatattcaattgtcaaaaaacagacctcatgaccaaaatcccttaacgtgagttttcgttccactgagcgtcagaccccgtagaaaagatcaaaggatcttcttgagatcctttttttctgcgcgtaatctgctgcttgcaaacaaaaaaaccaccgctaccagcggtggtttgtttgccggatcaagagctaccaactttttttccgaaggtaactggcttcagcagagcgcagataccaaatactgtccttctagtgtagccgtagttaggccaccacttcaagaactctgtagcaccgcctacatacctcgctctgctaatcctgttaccagtggctgctgccagtggcgataagtcgtgtcttaccgggttggactcaagacgatagttaccggataaggcgcagcggtcgggctgaacggggggttcgtgcacacagcccagcttggagcgaacgacctacaccgaactgagatacctacagcgtgagctatgagaaagcgccacgcttcccgaagggagaaaggcggacaggtatccggtaagcggcagggtcggaacaggagagcgcacgagggagcttccagggggaaacgcctggtatctttatagtcctgtcgggtttcgccacctctgacttgagcgtcgatttttgtgatgctcgtcaggggggcggagcctatggaaaaacgccagcaacgcggcctttttacggttcctggccttttgctggccttttgctcacatgttctttcctgcgttatcccctgattctgtggataaccgtattaccgcctttgagtgagctgataccgctcgccgcagccgaacgaccgagcgcagcgagtcagtgagcgaggaagcggaagagcgcctgatgcggtattttctccttacgcatctgtgcggtatttcacaccgcatatggtgcactctcagtacaatctgctctgatgccgcatagttaagccagtatacaggctctccttcacgatcaacgatcggcatggggccttcgtgcttgttgagtaatgttatcgctcccatcagagcacgcttggtactccgggaatcggatggtctgtcgatcatccaaaaaacgctcatgttttcaacctattaggtctgtggtcagctgaccacagaccatcctgctccatactcgctaattctagccaaaccgcaacgtcccctgcccgctagccttcaagagcgccattatcatcgggccaagtgaaaacttcccgagctcgctccgccgtgtcagatctcggagatagcccccgggcgaattgatgaagttcgctcgctccaaaatgcacgccatcgctgctgccgcattctccggtcccattgcctcacacgcgtcttggtaagccgacgggctgacccccagcatagaccgaaccaccaccgcagccgacatgaggtcacgccagctagcaaccgcaccgctcggcccataattgccaatggtcgggcatgctttcaggatcatcccgagggggaacgcttttatcggctcgctccttgcccggtctatttcactcggcttagcgccctgctccttttcagagcgaggttcaagttcattaacggattcgggttttgaattctgtatgtgctgctcgctctgggcagcattggtgctattattttctgaattgtctctaatttccaaccggttgattatctcttcctggagcatccacatctcttcgagaattgactctacatcagcaagcgtcggggcgcgtggaattctacccacaagttccacatagacttcctcgacagcttgccagtcgccctccgctccctcttccatagctgccgtaattagcttccgaacgtcccgtcggcaaatcgtcagactttctttggccatcctgaatgctgctcgatcggccatcacttgctgtgccatcatcgctagctcttcggaccgcgcgagaagcggagacaaatcgaagccaaacgcgcgctcgatctgaccagcgccatccttacgagcgtaacgctttccgttggcgctatccttccggacgatcaagcctgactccacgagcatggcgatgtgcctacgcaaagtcgcgccagccatcccatgcgcccgaagggcaagctgagcattcgacgggaagacgatcagctgtgcctcctgacgcaactccgtttccgggtgaaagctcaatagcgcatcaaggacggcaagactgttggactggattccaagtagttccatggccgcggacgcatctctaaagaccttccacttgtccgctgtcttgccttgtttgatatcggccagcgccgtctggcgccgcacaagcgcaagcgtcattggccgccgcccgaatggcgtcgttacacttcctgtctgcatcatctttcacctttcagcaggcaaaggaaatcagctcaccaaaacggcgctaaaaactcttgacgaggattcgaggaaatgcgattctgttcgcgctagagagacagaagggcttccgcgacggcgacgttgagggggctcttttcttttgcggtttactctccccgtttccgttggttctcagcgtggtacgcttgatacagcgctggcacatgatcgagcacgaaggtcgcaaaatcgggcgtcgccttcctgtcaatcgtgatttccagtttggccttgctctgcgtcacctgtgcaattctggtgccgtctggggtggccatgacctcgggaagtccacgcgcaacccgactgggcttcagactagcgatcaccgccttgaatcgttctgccgatggcagcgcttgaacttcctccgacatagcatatttagccacgtcggccggtgaagaaactttctcaatcagctcggcaagttgttgccaactcggccgtccaacaccaggagcggcaccaatagcatcggtcagttcagaggggagggcgtcgacgagcagaagcatcttggacaaattgctcttgtcgatcgacatcgcggcgatgacaatctctcgagaaaactgcctgttcaggcgatgtgcgaagcgcgccttttcgatgaaggtaagatcttcgcgctcattgttttcctgaccctgtgctacgaccacttgctcgtccgtcagttcgcgaacgaccgctctgaccggaagtccgagttctgaaacggcgcgtagccggcggtggccgaaggcaacctgatatcggcccggctggctcggatgcggtcgcacaaggattgggacttgctgtccttgttcccggatcgaagtaaggagcccgtcaatgtcccctcgcatacgatcctgcacgaaagacggttctattgacgaggcatccaactctatcactgcctgaccttcagcgaggcgccgctcgatctcttcggcacggctaagacgatcgttttgctctcgcagtgcgttaccaatgttcgctgtgagcttcgttgccggatcgcgctccttccttgttacgccgaggagcggcatggagcggttctttgccgtcctattgtcggcgggcgacgtttcaggggcgtcagttgacacgccaaggatgtgcttccggctcatgtgggcctaccccatgcttttttgatcagtgtttcgatctcgtcgttgacggcgttcatcgcctccaaggctcgatcataggtcgagcgcgtgaacaggccacgctccacttcgaatagagtctggtttgtcaggccagcgtccgaaaccgcggtggttttaagcatcggaaaattgaggacattttcgccaaaaatcgaccgcagataacctaccatttggttctgtggtccgtcgctcggttcgaaacgggttatcagatagcgcatccaattaaacttgaacttggcgccagcattctcgatttcacgcaaaaggttcgatgtcattgccagaaactggttcatcgacatcacatccagcatctgcggatggaccgtgacaagaatggacgtcgccgcagtcaatgcggatagcgtgagatacccaagctggggagggcagtcgatgaccacgacgtcatagttatccgcgatatcttcaattacttggctgatgcgaccataaaagagcgtgtcgccctctttgcggttcatcagcgcgcgtggcgtatcgtgttcaaactccatcagctcaaggttaccaggaatcaggtggaggtcgggaatgtaagtccctcggacgactcgttcgattgccacttgctcatcatcataccttatagcgccgtagagcgtttcgttcgggccaacgtccgtttccggttggctcccaaagagtgcagaaaggctcgcttgaggatcgagatcaatggccaagactcgatatccgcgcatagcgaggtactgcgccagatgcgcggcggtggtggtcttacccgacccacctttgaaattcatcacagagataacctgaagctgctcgccgcctcgacgatgtggcaggtagcgccggttcccgcggccgacctgatccatatacttccgaatcacatggatatcttcaattgagaacattcgcctgccacccgggctcatgctaacattcaactctggcatctcagacgcggtctgccgtaaatatgactcgccaacgccgagcagcttggacgcctccgatggcccgaatgttcgaatgcccttctcggaatgcggcgggaaaaccttaagatgatgtgcttgaagttggctcgagagggcatcggcatgacgctccatcaaggccgtcaaccctacaactacaggcgctgcttttaggacagacttcgccatctcaaacccattccttgccagtggcgatatttttcgcgaaactggaaaagttccgccgctggcaattagcgccgattctgctgtttgggcaagagcttttaggttaacagaaggttaacgccctcaggtcgaaaaactccacccaactgttatttgtatttatttccaatgccttagagagattgccatttgaatatgttcatgtattgttttagtgataatcctacaatcgtaacccaaaaagaggtcgccctctgcgcgccgtcgtccaatataggcgaagtcacccttgcgactcaggcggattctaccttgtacacgtgtcgagtggaaaagtcccatgtggatcactccgttgccccgtcgctcaccgtgttggggggaaggtgcacatggctcagttctcaatggaaattatctgcctaaccggctcagttctgcgtagaaaccaacatgcaagctccaccgggtgcaaagcggcagcggcggcaggatatattcaattgtaaatggcttcatgtccgggaaatctacatggatcagcaatgagtatgatggtcaatatggagaaaaagaaagagtaattaccaattttttttcaattcaaaaatgtagatgtccgcagcgttattataaaatgaaagtacattttgataaaacgacaaattacgatccgtcgtatttataggcgaaagcaataaacaaattattctaattcggaaatctttatttcgacgtgtctacattcacgtccaaatgggggcttagatgagaaacttcacgatcgatgcggccctgccggcgcgccactagtcaacaattggccaatctttgttctaaattgctaataaacgaccatttccgtcaattctccttggttgcaacagtctacccgtcaaatgtttactaatttataagtgtgaagtttgaattatgaaagacgaaatcgtattaaaaattcacaagaataaacaactccatagattttcaaaaaaacagtcacgagaaaaaaaccacagtccgtttgtctgctcttctagtttttattatttttctattaatagttttttgttatttcgagaataaaatttgaacgatgtccgaaccacaaaagccgagccgataaatcctaagccgagcctaactttagccgtaaccatcagtcacggctcccgggctaattcatttgaaccgaatcataatcaacggtttagatcaaactcaaaacaatctaacggcaacatagacgcgtcggtgagctaaaaagagtgtgaaagccaggtcaccatagcattgtctctcccagattttttatttgggaaataatagaagaaatagaaaaaaataaaagagtgagaaaaatcgtagagctatatattcgcacatgtactcgtttcgctttccttagtgttagctgctgccgctgttgtttctcctccatttctctatctttctctctcgctgcttctcgaatcttctgtatcatcttcttcttcttcaaggtgagtctctagatccgttcgcttgattttgctgctcgttagtcgttattgttgattctctatgccgatttcgctagatctgtttagcatgcgttgtggttttatgagaaaatctttgttttgggggttgcttgttatgtgattcgatccgtgcttgttggatcgatctgagctaattcttaaggtttatgtgttagatctatggagtttgaggattcttctcgcttctgtcgatctctcgctgttatttttgtttttttcagtgaagtgaagttgtttagttcgaaatgacttcgtgtatgctcgattgatctggttttaatcttcgatctgttaggtgttgatgtttacaagtgaattctagtgttttctcgttgagatctgtgaagtttgaacctagttttctcaataatcaacatatgaagcgatgtttgagtttcaataaacgctgctaatcttcgaaactaagttgtgatctgattcgtgtttacttcatgagcttatccaattcatttcggtttcattttactttttttttagtgaaccatggcgcaagttagcagaatctgcaatggtgtgcagaacccatctcttatctccaatctctcgaaatccagtcaacgcaaatctcccttatcggtttctctgaagacgcagcagcatccacgagcttatccgatttcgtcgtcgtggggattgaagaagagtgggatgacgttaattggctctgagcttcgtcctcttaaggtcatgtcttctgtttccacggcgtgcatgggggaagcggtgatcgccgaagtatcgactcaactatcagaggtagttggcgtcatcgagcgccatctcgaaccgacgttgctggccgtacatttgtacggctccgcagtggatggcggcctgaagccacacagtgatattgatttgctggttacggtgaccgtaaggcttgatgaaacaacgcggcgagctttgatcaacgaccttttggaaacttcggcttcccctggagagagcgagattctccgcgctgtagaagtcaccattgttgtgcacgacgacatcattccgtggcgttatccagctaagcgcgaactgcaatttggagaatggcagcgcaatgacattcttgcaggtatcttcgagccagccacgatcgacattgatctggctatcttgctgacaaaagcaagagaacatagcgttgccttggtaggtccagcggcggaggaactctttgatccggttcctgaacaggatctatttgaggcgctaaatgaaaccttaacgctatggaactcgccgcccgactgggctggcgatgagcgaaatgtagtgcttacgttgtcccgcatttggtacagcgcagtaaccggcaaaatcgcgccgaaggatgtcgctgccgactgggcaatggagcgcctgccggcccagtatcagcccgtcatacttgaagctagacaggcttatcttggacaagaagaagatcgcttggcctcgcgcgcagatcagttggaagaatttgtccactacgtgaaaggcgagatcaccaaggtagtcggcaaataaggatcaattcccgatcgttcaaacatttggcaataaagtttcttaagattgaatcctgttgccggtcttgcgatgattatcatataatttctgttgaattacgttaagcatgtaataattaacatgtaatgcatgacgttatttatgagatgggtttttatgattagagtcccgcaattatacatttaatacgcgatagaaaacaaaatatagcgcgcaaactaggataaattatcgcgcgcggtgtcatctatgttactagatcacgcgtgtatgcaatatcctgcagggtattaattaattatgccctaagacatcctggaccaatatgctgaagattatgctacctacaccaggataggacttgaagcacttaaccttgaagattggttcgaagaaccagaacccgatccacctaaccctgtggaccgccagaggatagaggacatcctggacctactgaacgtcagcaatgacgactgaaagattcccaggacaccggcggaagtggtggacccagtctaggtgcgatgcttagtcgcgcacgatgactatgtcggaaggcatctttgctttcggcaaactttagtaatactttaaggaaagtattgtacaagttaggtgcagagacaataatgcacccagctttagctttgtttatggaattattgtgtcggttgcattattggatgcctgcgtgcaccctaagcaatcaacggagaaacaaagataaaaatcaattactcacatgaaagagtattgatcacgagtcactatggagcgacaatctccagacaggatgtcagcatcttatcttcctttgaagaaagcatcatcaataacgatgtaatggtggggacatccactaagttattgctctgcaaacagctcaaaaagctactggccgacaatcataattgctcggcatgtccaggtggggcctccactagcaataatacaagctttacagcttgcagtgactcatcctccaataatggagaaaaagacgtcagcagtgacgaacaagggtcgaaagacttgcctatataagggcattctcccctcagttgaagatcatcgaaagttggagcaataaactctctcttcaacaaatctatcttttatcttttatcgccgcaatggcgggatctaagaagagaagaattaaacaagatggctataccagcgacgaggaggtgctggaagtcttccgcaacacactgaataagaatagcgagattttctcctccatcaagaagctcgagaagctctttaagaactttgacgagtacagctccgccgggattttcgtgaagaacgggccggcgatcagcaccatctccaaggacatctttggcgagtggaacgtcatcagggacaagtggaacgccgagtacgacgacatccacctgaagaagaaggcggtggtgaccgagaagtatgaggacgatcgcaggaagtccttcaaaaaaatcggctccttcagcctcgaacagctccaggagtatgccgatgcggatctgtccgtcgtcgagaagctgaaggaaatcatcattcagaaggtcgacgagatctataaagtgtacgggtccagcgagaagctgttcgacgccgactttgtgctcgagaagtccctcaaaaagaatgacgccgtggtggccattatgaaagacctgctcgactccgtgaagtccttcgaaaattacattaaagcgttctttggggaggggaaggaaactaacagggatgagtccttctatggcgactttgtcctcgcgtacgacatcctgctgaaggtcgaccacatttacgacgcgatccgcaactacgtgacacagaagccgtactccaaagacaagttcaagctgtacttccagaacccgcaatttatggggggctgggacaaggataaagagacagactaccgcgcgacaattctccgctatggctccaaatactatctggccatcatggacaagaagtacgcgaagtgcctgcagaagatcgacaaagacgacgtcaatggcaactatgaaaagatcaactacaagctgctgccgggcccgaacaagatgctcccgaaggtgttcttcagcaagaagtggatggcctactacaatccaagcgaggatattcagaaaatctataaaaacgggaccttcaagaagggggacatgtttaacctcaacgactgccacaagctcattgatttcttcaaggatagcatttcccgctacccgaaatggtccaatgcgtacgattttaacttctccgagacagaaaagtacaaagacatcgcgggcttttacagggaggtggaggagcaagggtataaagtttcttttgaatccgcgagcaagaaggaagtcgacaagctcgtcgaggagggcaagctctacatgttccaaatttataacaaggacttttccgacaagagccatgggaccccaaacctccacaccatgtacttcaaactgctctttgacgagaacaaccacgggcaaatcaggctgagcggcggcgccgaattattcatgcgcagggcctccctcaagaaggaagagctggtcgtccatccagccaattccccgatcgcgaacaagaacccggacaatccgaaaaagaccaccaccctgtcctacgacgtctacaaggacaaacgcttcagcgaagaccagtacgaattacacatcccaattgcgattaataagtgcccaaagaatatcttcaaaattaatacagaggtcagggtgctgctcaaacacgacgacaatccgtatgtcatcggcattgacaggggcgagcgcaatctgctctatatcgtggtcgtggatgggaagggcaatattgtggagcagtactccctgaacgagattatcaacaacttcaatgggattaggattaagaccgactatcacagcctgctcgacaagaaagaaaaagagaggtttgaggcccgccaaaactggacctccattgagaatatcaaagaattaaaggccggctatatttcccaagtcgtccacaagatctgcgagctggtggagaaatatgacgccgtgattgcgctcgaagacttaaattctgggttcaagaactcccgcgtgaaggtggaaaaacaggtgtatcagaaattcgagaaaatgctgatcgacaaactcaattatatggtggataagaagtccaacccgtgtgccacagggggcgcgctgaagggctatcagatcaccaacaagttcgagagcttcaagagcatgagcacccagaacgggtttattttctacatcccggcgtggctcacctccaagattgacccgagcaccggcttcgtgaacctcctgaagacaaagtatacctccattgccgacagcaagaagtttatctcctccttcgaccgcattatgtatgtgccggaggaggacctcttcgagttcgccctcgactacaaaaacttcagccgcacagatgcggattacatcaagaagtggaagctgtactcctacgggaacaggatccgcatcttcaggaatccaaaaaaaaataacgtctttgactgggaggaagtgtgcctgacatccgcctacaaggaactgttcaataaatacggcatcaattaccagcagggcgacattcgcgccctcctctgtgagcagtccgacaaagcgttttactccagcttcatggccctcatgtccctgatgctccaaatgaggaatagcatcacagggcgcaccgacgtcgacttcctcatcagcccggtgaagaactccgacgggatcttttacgactcccgcaactatgaggcgcaagagaatgcgatcctcccgaagaacgccgatgcgaacggggcctataatatcgccaggaaagtgctctgggccatcgggcagttcaaaaaggcggaggatgagaagctcgacaaggtgaaaattgccatttccaacaaggagtggctggagtacgcgcagacctccgtgaagcacggctcctctggcagctccggctctagcggctcctctggcagctccggctccaagctggagaagtttacaaactgttacagcctctccaaaaccctcaggtttaaagcgatcccggtgggcaagacccaggagaacatcgacaacaagaggctcctggtggaagacgagaagcgcgccgaagactacaagggcgtgaagaagctgctcgataggtactacctcagctttattaacgacgtgctgcacagcatcaaactcaagaatctcaacaactacatctccctcttccgcaaaaagacccgcaccgagaaggagaacaaggagctggagaacctggagatcaacctccgcaaggaaatcgccaaagcgttcaagggcaatgaagggtacaagagcctcttcaagaaagacatcatcgaaactatcctcccagagtttctcgatgacaaggacgagatcgcgctggtgaactcctttaacgggttcacaaccgcgtttaccggcttctttaggaacagggaaaatatgttctccgaggaggccaagtccaccagcatcgccttcaggtgtatcaacgagaacctcacccgctacatttccaatatggacattttcgagaaggtggatgcgatcttcgataagcacgaggtgcaggagatcaaagagaagattctcaattccgattatgacgtcgaggatttcttcgaaggggagttctttaattttgtgctcacacaagagggcattgacgtgtacaacgcgattatcgggggcttcgtcacagagtccggggagaagattaaggggctgaatgagtacatcaatctgtacaatcagaagaccaagcagaaactgccgaaattcaagccgctctacaagcaagtcctgtccgatagggaaagcctctccttctacggcgagggatctaagaagagaagaattaaacaagattgatagaagggctctctgtcatgatttcatactttcattattgagctctgtaattacaattatgaccatgagaacatctcttattgtgtggccttttaattgctgatgttagtactgaaccaaagcttatcgtgatgatgtaaaagcaataagtacttgtttgtagcttctttgtgtctccctttgggcttaatacatctgtttagtgttgtggctttggcatagacttctcttggtaataatgccttgcaatgcaaaatttcaattatcaaattctattatgttctcaccttatggtaacagcttaccctgtggaagatgagattcttgagttgagtcattgccaatttttggcattagcttttgaattagtgaattttgacaaaaattaccgtgacactgattttgttgaagctcttaagtgtagtttttacaaaatttcagtggctcgttgtgattatgtcaaactcacggcgaatgtagttcttacagaatttcagtggctcaaggatttaacgcgtgtatgcggccgcaaactatttaaatgcaggcgataaaaatgttttaaacgatatatattataaaaaaaaacgtttcaaaaataaatacaaaaatgtttttaaatatatataatttaactcattaaagaaaataaaaatgcaagtgcggtgacaagacaagctaaaagttgcaaaagaaatggcagggctataaggctcacctactcctggatttaccaaattttggttcgtccctatactcgaaaaataaaacaaaataaatttcagtatcttcgtttttgtatgctttgactgtgaggcgaggccaactttcttcttctgtctgagatgaattttgtttgcctcctgtgaaggatgtatcattcaaagtgaatgttttgcaactgccagtagtcccacatcgaccaaatattcttattacagtgtgtttatatagcacctggagaaggaatgggttgtttcaaagattaaataatttctactaagtgtagatcaagggactcaacatcaaaggattaatttctactaagtgtagatcaagggactcaacatcaaaggattaatttctactaagtgtagatcaagggactcaacatcaaaggattaatttctactaagtgtagatttttttttgcggccgcaacagagaaactagacctgcaggaaggcgccggcgctctcttaaggtagc

SEQ ID NO: 751 - DNA, 15555 bp, synthetic construct
  source 1..15555: mol_type = other DNA
aaggatccctgaaagcgacgttggatgttaacatctacaaattgccttttcttatcgaccatgtacgtaagcgcttacgtttttggtggacccttgaggaaactggtagctgttgtgggcctgtggactcaagatggatcattaatttccaccttcacctacgatggggggcatcgcaccggtgagtaatattgtacggctaagagcgaatttggcctgtagacctcaattgcgagctttctaatttcaaactattcgggcctaacttttggtgtgatgatgctgactggcaggatatataccgttgtaatttgagctcgtgtgaataagtcgctgtgtatgtttgtttgattgtttctgttggagtgcagcccatttcaccggacaagtcggctagattgatttagccctgatgaactgccgaggggaagccatcttgagcgcggaatgggaatggatttcgttgtacaacgacacgacagaacacccacgggaccgagcttcgaagctttaacgcttgagttaagccgcgccgcgaagcggcgtcggcttgaacgaattgttagacatcagaagaactcgtcaagaaggcgatagaaggcgatgcgctgcgaatcgggagcggcgataccgtaaagcacgaggaagcggtcagcccattcgccgccaagctcttcagcaatatcacgggtagccaacgctatgtcctgatagcggtccgccacacccagccggccacagtcgatgaatccagaaaagcggccattttccaccatgatattcggcaagcaggcatcgccatgggtcacgacgagatcctcgccgtcgggcatgcgcgccttgagcctggcgaacagttcggctggcgcgagcccctgatgctcttcgtccagatcatcctgatcgacaagaccggcttccatccgagtacgtgctcgctcgatgcgatgtttcgcttggtggtcgaatgggcaggtagccggatcaagcgtatgcagccgccgcattgcatcagccatgatggatactttctcggcaggagcaaggtgagatgacaggagatcctgccccggcacttcgcccaatagcagccagtcccttcccgcttcagtgacaacgtcgagcacagctgcgcaaggaacgcccgtcgtggccagccacgatagccgcgctgcctcgtcctgcagttcattcagggcaccggacaggtcggtcttgacaaaaagaaccgggcgcccctgcgctgacagccggaacacggcggcatcagagcagccgattgtctgttgtgcccagtcatagccgaatagcctctccacccaagcggccggagaacctgcgtgcaatccatcttgttcaatcatggctttgtttctccttcaatcattgactattgtcacgttattctgaatcgacgagaactcacatcaatctcaacaagcatctctgctcgcgaaattggtgttgtctcattaaaacgtgaccgtcaaagtctattcactaggacccaaatctctccaggtcccgcaagctagcttcgccgcccacgtttctctttcttctcatattcaattgtcaaaaaacagacctcatgaccaaaatcccttaacgtgagttttcgttccactgagcgtcagaccccgtagaaaagatcaaaggatcttcttgagatcctttttttctgcgcgtaatctgctgcttgcaaacaaaaaaaccaccgctaccagcggtggtttgtttgccggatcaagagctaccaactttttttccgaaggtaactggcttcagcagagcgcagataccaaatactgtccttctagtgtagccgtagttaggccaccacttcaagaactctgtagcaccgcctacatacctcgctctgctaatcctgttaccagtggctgctgccagtggcgataagtcgtgtcttaccgggttggactcaagacgatagttaccggataaggcgcagcggtcgggctgaacggggggttcgtgcacacagcccagcttggagcgaacgacctacaccgaactgagatacctacagcgtgagctatgagaaagcgccacgcttcccgaagggagaaaggcggacaggtatccggtaagcggcagggtcggaacaggagagcgcacgagggagcttccagggggaaacgcctggtatctttatagtcctgtcgggtttcgccacctctgacttgagcgtcgatttttgtgatgctcgtcaggggggcggagcctatggaaaaacgccagcaacgcggcctttttacggttcctggccttttgctggccttttgctcacatgttctttcctgcgttatcccctgattctgtggataaccgtattaccgcctttgagtgagctgataccgctcgccgcagccgaacgaccgagcgcagcgagtcagtgagcgaggaagcggaagagcgcctgatgcggtattttctccttacgcatctgtgcggtatttcacaccgcatatggtgcactctcagtacaatctgctctgatgccgcatagttaagccagtatacaggctctccttcacgatcaacgatcggcatggggccttcgtgcttgttgagtaatgttatcgctcccatcagagcacgcttggtactccgggaatcggatggtctgtcgatcatccaaaaaacgctcatgttttcaacctattaggtctgtggtcagctgaccacagaccatcctgctccatactcgctaattctagccaaaccgcaacgtcccctgcccgctagccttcaagagcgccattatcatcgggccaagtgaaaacttcccgagctcgctccgccgtgtcagatctcggagatagcccccgggcgaattgatgaagttcgctcgctccaaaatgcacgccatcgctgctgccgcattctccggtcccattgcctcacacgcgtcttggtaagccgacgggctgacccccagcatagaccgaaccaccaccgcagccgacatgaggtcacgccagctagcaaccgcaccgctcggcccataattgccaatggtcgggcatgctttcaggatcatcccgagggggaacgcttttatcggctcgctccttgcccggtctatttcactcggcttagcgccctgctccttttcagagcgaggttcaagttcattaacggattcgggttttgaattctgtatgtgctgctcgctctgggcagcattggtgctattattttctgaattgtctctaatttccaaccggttgattatctcttcctggagcatccacatctcttcgagaattgactctacatcagcaagcgtcggggcgcgtggaattctacccacaagttccacatagacttcctcgacagcttgccagtcgccctccgctccctcttccatagctgccgtaattagcttccgaacgtcccgtcggcaaatcgtcagactttctttggccatcctgaatgctgctcgatcggccatcacttgctgtgccatcatcgctagctcttcggaccgcgcgagaagcggagacaaatcgaagccaaacgcgcgctcgatctgaccagcgccatccttacgagcgtaacgctttccgttggcgctatccttccggacgatcaagcctgactccacgagcatggcgatgtgcctacgcaaagtcgcgccagccatcccatgcgcccgaagggcaagctgagcattcgacgggaagacgatcagctgtgcctcctgacgcaactccgtttccgggtgaaagctcaatagcgcatcaaggacggcaagactgttggactggattccaagtagttccatggccgcggacgcatctctaaagaccttccacttgtccgctgtcttgccttgtttgatatcggccagcgccgtctggcgccgcacaagcgcaagcgtcattggccgccgcccgaatggcgtcgttacacttcctgtctgcatcatctttcacctttcagcaggcaaaggaaatcagctcaccaaaacggcgctaaaaactcttgacgaggattcgaggaaatgcgattctgttcgcgctagagagacagaagggcttccgcgacggcgacgttgagggggctcttttcttttgcggtttactctccccgtttccgttggttctcagcgtggtacgcttgatacagcgctggcacatgatcgagcacgaaggtcgcaaaatcgggcgtcgccttcctgtcaatcgtgatttccagtttggccttgctctgcgtcacctgtgcaattctggtgccgtctggggtggccatgacctcgggaagtccacgcgcaacccgactgggcttcagactagcgatcaccgccttgaatcgttctgccgatggcagcgcttgaacttcctccgacatagcatatttagccacgtcggccggtgaagaaactttctcaatcagctcggcaagttgttgccaactcggccgtccaacaccaggagcggcaccaatagcatcggtcagttcagaggggagggcgtcgacgagcagaagcatcttggacaaattgctcttgtcgatcgacatcgcggcgatgacaatctctcgagaaaactgcctgttcaggcgatgtgcgaagcgcgccttttcgatgaaggtaagatcttcgcgctcattgttttcctgaccctgtgctacgaccacttgctcgtccgtcagttcgcgaacgaccgctctgaccggaagtccgagttctgaaacggcgcgtagccggcggtggccgaaggcaacctgatatcggcccggctggctcggatgcggtcgcacaaggattgggacttgctgtccttgttcccggatcgaagtaaggagcccgtcaatgtcccctcgcatacgatcctgcacgaaagacggttctattgacgaggcatccaactctatcactgcctgaccttcagcgaggcgccgctcgatctcttcggcacggctaagacgatcgttttgctctcgcagtgcgttaccaatgttcgctgtgagcttcgttgccggatcgcgctccttccttgttacgccgaggagcggcatggagcggttctttgccgtcctattgtcggcgggcgacgtttcaggggcgtcagttgacacgccaaggatgtgcttccggctcatgtgggcctaccccatgcttttttgatcagtgtttcgatctcgtcgttgacggcgttcatcgcctccaaggctcgatcataggtcgagcgcgtgaacaggccacgctccacttcgaatagagtctggtttgtcaggccagcgtccgaaaccgcggtggttttaagcatcggaaaattgaggacattttcgccaaaaatcgaccgcagataacctaccatttggttctgtggtccgtcgctcggttcgaaacgggttatcagatagcgcatccaattaaacttgaacttggcgccagcattctcgatttcacgcaaaaggttcgatgtcattgccagaaactggttcatcgacatcacatccagcatctgcggatggaccgtgacaagaatggacgtcgccgcagtcaatgcggatagcgtgagatacccaagctggggagggcagtcgatgaccacgacgtcatagttatccgcgatatcttcaattacttggctgatgcgaccataaaagagcgtgtcgccctctttgcggttcatcagcgcgcgtggcgtatcgtgttcaaactccatcagctcaaggttaccaggaatcaggtggaggtcgggaatgtaagtccctcggacgactcgttcgattgccacttgctcatcatcataccttatagcgccgtagagcgtttcgttcgggccaacgtccgtttccggttggctcccaaagagtgcagaaaggctcgcttgaggatcgagatcaatggccaagactcgatatccgcgcatagcgaggtactgcgccagatgcgcggcggtggtggtcttacccgacccacctttgaaattcatcacagagataacctgaagctgctcgccgcctcgacgatgtggcaggtagcgccggttcccgcggccgacctgatccatatacttccgaatcacatggatatcttcaattgagaacattcgcctgccacccgggctcatgctaacattcaactctggcatctcagacgcggtctgccgtaaatatgactcgccaacgccgagcagcttggacgcctccgatggcccgaatgttcgaatgcccttctcggaatgcggcgggaaaaccttaagatgatgtgcttgaagttggctcgagagggcatcggcatgacgctccatcaaggccgtcaaccctacaactacaggcgctgcttttaggacagacttcgccatctcaaacccattccttgccagtggcgatatttttcgcgaaactggaaaagttccgccgctggcaattagcgccgattctgctgtttgggcaagagcttttaggttaacagaaggttaacgccctcaggtcgaaaaactccacccaactgttatttgtatttatttccaatgccttagagagattgccatttgaatatgttcatgtattgttttagtgataatcctacaatcgtaacccaaaaagaggtcgccctctgcgcgccgtcgtccaatataggcgaagtcacccttgcgactcaggcggattctaccttgtacacgtgtcgagtggaaaagtcccatgtggatcactccgttgccccgtcgctcaccgtgttggggggaaggtgcacatggctcagttctcaatggaaattatctgcctaaccggctcagttctgcgtagaaaccaacatgcaagctccaccgggtgcaaagcggcagcggcggcaggatatattcaattgtaaatggcttcatgtccgggaaatctacatggatcagcaatgagtatgatggtcaatatggagaaaaagaaagagtaattaccaattttttttcaattcaaaaatgtagatgtccgcagcgttattataaaatgaaagtacattttgataaaacgacaaattacgatccgtcgtatttataggcgaaagcaataaacaaattattctaattcggaaatctttatttcgacgtgtctacattcacgtccaaatgggggcttagatgagaaacttcacgatcgatgcggccctgccggcgcgccactagtcaacaattggccaatctttgttctaaattgctaataaacgaccatttccgtcaattctccttggttgcaacagtctacccgtcaaatgtttactaatttataagtgtgaagtttgaattatgaaagacgaaatcgtattaaaaattcacaagaataaacaactccatagattttcaaaaaaacagtcacgagaaaaaaaccacagtccgtttgtctgctcttctagtttttattatttttctattaatagttttttgttatttcgagaataaaatttgaacgatgtccgaaccacaaaagccgagccgataaatcctaagccgagcctaactttagccgtaaccatcagtcacggctcccgggctaattcatttgaaccgaatcataatcaacggtttagatcaaactcaaaacaatctaacggcaacatagacgcgtcggtgagctaaaaagagtgtgaaagccaggtcaccatagcattgtctctcccagattttttatttgggaaataatagaagaaatagaaaaaaataaaagagtgagaaaaatcgtagagctatatattcgcacatgtactcgtttcgctttccttagtgttagctgctgccgctgttgtttctcctccatttctctatctttctctctcgctgcttctcgaatcttctgtatcatcttcttcttcttcaaggtgagtctctagatccgttcgcttgattttgctgctcgttagtcgttattgttgattctctatgccgatttcgctagatctgtttagcatgcgttgtggttttatgagaaaatctttgttttgggggttgcttgttatgtgattcgatccgtgcttgttggatcgatctgagctaattcttaaggtttatgtgttagatctatggagtttgaggattcttctcgcttctgtcgatctctcgctgttatttttgtttttttcagtgaagtgaagttgtttagttcgaaatgacttcgtgtatgctcgattgatctggttttaatcttcgatctgttaggtgttgatgtttacaagtgaattctagtgttttctcgttgagatctgtgaagtttgaacctagttttctcaataatcaacatatgaagcgatgtttgagtttcaataaacgctgctaatcttcgaaactaagttgtgatctgattcgtgtttacttcatgagcttatccaattcatttcggtttcattttactttttttttagtgaaccatggcgcaagttagcagaatctgcaatggtgtgcagaacccatctcttatctccaatctctcgaaatccagtcaacgcaaatctcccttatcggtttctctgaagacgcagcagcatccacgagcttatccgatttcgtcgtcgtggggattgaagaagagtgggatgacgttaattggctctgagcttcgtcctcttaaggtcatgtcttctgtttccacggcgtgcatgggggaagcggtgatcgccgaagtatcgactcaactatcagaggtagttggcgtcatcgagcgccatctcgaaccgacgttgctggccgtacatttgtacggctccgcagtggatggcggcctgaagccacacagtgatattgatttgctggttacggtgaccgtaaggcttgatgaaacaacgcggcgagctttgatcaacgaccttttggaaacttcggcttcccctggagagagcgagattctccgcgctgtagaagtcaccattgttgtgcacgacgacatcattccgtggcgttatccagctaagcgcgaactgcaatttggagaatggcagcgcaatgacattcttgcaggtatcttcgagccagccacgatcgacattgatctggctatcttgctgacaaaagcaagagaacatagcgttgccttggtaggtccagcggcggaggaactctttgatccggttcctgaacaggatctatttgaggcgctaaatgaaaccttaacgctatggaactcgccgcccgactgggctggcgatgagcgaaatgtagtgcttacgttgtcccgcatttggtacagcgcagtaaccggcaaaatcgcgccgaaggatgtcgctgccgactgggcaatggagcgcctgccggcccagtatcagcccgtcatacttgaagctagacaggcttatcttggacaagaagaagatcgcttggcctcgcgcgcagatcagttggaagaatttgtccactacgtgaaaggcgagatcaccaaggtagtcggcaaataaggatcaattcccgatcgttcaaacatttggcaataaagtttcttaagattgaatcctgttgccggtcttgcgatgattatcatataatttctgttgaattacgttaagcatgtaataattaacatgtaatgcatgacgttatttatgagatgggtttttatgattagagtcccgcaattatacatttaatacgcgatagaaaacaaaatatagcgcgcaaactaggataaattatcgcgcgcggtgtcatctatgttactagatcacgcgtgtatgcaatatcctgcagggtattaattaattatgccctaagacatcctggaccaatatgctgaagattatgctacctacaccaggataggacttgaagcacttaaccttgaagattggttcgaagaaccagaacccgatccacctaaccctgtggaccgccagaggatagaggacatcctggacctactgaacgtcagcaatgacgactgaaagattcccaggacaccggcggaagtggtggacccagtctaggtgcgatgcttagtcgcgcacgatgactatgtcggaaggcatctttgctttcggcaaactttagtaatactttaaggaaagtattgtacaagttaggtgcagagacaataatgcacccagctttagctttgtttatggaattattgtgtcggttgcattattggatgcctgcgtgcaccctaagcaatcaacggagaaacaaagataaaaatcaattactcacatgaaagagtattgatcacgagtcactatggagcgacaatctccagacaggatgtcagcatcttatcttcctttgaagaaagcatcatcaataacgatgtaatggtggggacatccactaagttattgctctgcaaacagctcaaaaagctactggccgacaatcataattgctcggcatgtccaggtggggcctccactagcaataatacaagctttacagcttgcagtgactcatcctccaataatggagaaaaagacgtcagcagtgacgaacaagggtcgaaagacttgcctatataagggcattctcccctcagttgaagatcatcgaaagttggagcaataaactctctcttcaacaaatctatcttttatcttttatcgccgcaatggcgggatctaagaagagaagaattaaacaagattccgacgggatcttttacgactcccgcaactatgaggcgcaagagaatgcgatcctcccgaagaacgccgatgcgaacggggcctataatatcgccaggaaagtgctctgggccatcgggcagttcaaaaaggcggaggatgagaagctcgacaaggtgaaaattgccatttccaacaaggagtggctggagtacgcgcagacctccgtgaagcacggctcctctggcagctccggctctagcggctcctctggcagctccggctccaagctggagaagtttacaaactgttacagcctctccaaaaccctcaggtttaaagcgatcccggtgggcaagacccaggagaacatcgacaacaagaggctcctggtggaagacgagaagcgcgccgaagactacaagggcgtgaagaagctgctcgataggtactacctcagctttattaacgacgtgctgcacagcatcaaactcaagaatctcaacaactacatctccctcttccgcaaaaagacccgcaccgagaaggagaacaaggagctggagaacctggagatcaacctccgcaaggaaatcgccaaagcgttcaagggcaatgaagggtacaagagcctcttcaagaaagacatcatcgaaactatcctcccagagtttctcgatgacaaggacgagatcgcgctggtgaactcctttaacgggttcacaaccgcgtttaccggcttctttaggaacagggaaaatatgttctccgaggaggccaagtccaccagcatcgccttcaggtgtatcaacgagaacctcacccgctacatttccaatatggacattttcgagaaggtggatgcgatcttcgataagcacgaggtgcaggagatcaaagagaagattctcaattccgattatgacgtcgaggatttcttcgaaggggagttctttaattttgtgctcacacaagagggcattgacgtgtacaacgcgattatcgggggcttcgtcacagagtccggggagaagattaaggggctgaatgagtacatcaatctgtacaatcagaagaccaagcagaaactgccgaaattcaagccgctctacaagcaagtcctgtccgatagggaaagcctctccttctacggcgagggctataccagcgacgaggaggtgctggaagtcttccgcaacacactgaataagaatagcgagattttctcctccatcaagaagctcgagaagctctttaagaactttgacgagtacagctccgccgggattttcgtgaagaacgggccggcgatcagcaccatctccaaggacatctttggcgagtggaacgtcatcagggacaagtggaacgccgagtacgacgacatccacctgaagaagaaggcggtggtgaccgagaagtatgaggacgatcgcaggaagtccttcaaaaaaatcggctccttcagcctcgaacagctccaggagtatgccgatgcggatctgtccgtcgtcgagaagctgaaggaaatcatcattcagaaggtcgacgagatctataaagtgtacgggtccagcgagaagctgttcgacgccgactttgtgctcgagaagtccctcaaaaagaatgacgccgtggtggccattatgaaagacctgctcgactccgtgaagtccttcgaaaattacattaaagcgttctttggggaggggaaggaaactaacagggatgagtccttctatggcgactttgtcctcgcgtacgacatcctgctgaaggtcgaccacatttacgacgcgatccgcaactacgtgacacagaagccgtactccaaagacaagttcaagctgtacttccagaacccgcaatttatggggggctgggacaaggataaagagacagactaccgcgcgacaattctccgctatggctccaaatactatctggccatcatggacaagaagtacgcgaagtgcctgcagaagatcgacaaagacgacgtcaatggcaactatgaaaagatcaactacaagctgctgccgggcccgaacaagatgctcccgaaggtgttcttcagcaagaagtggatggcctactacaatccaagcgaggatattcagaaaatctataaaaacgggaccttcaagaagggggacatgtttaacctcaacgactgccacaagctcattgatttcttcaaggatagcatttcccgctacccgaaatggtccaatgcgtacgattttaacttctccgagacagaaaagtacaaagacatcgcgggcttttacagggaggtggaggagcaagggtataaagtttcttttgaatccgcgagcaagaaggaagtcgacaagctcgtcgaggagggcaagctctacatgttccaaatttataacaaggacttttccgacaagagccatgggaccccaaacctccacaccatgtacttcaaactgctctttgacgagaacaaccacgggcaaatcaggctgagcggcggcgccgaattattcatgcgcagggcctccctcaagaaggaagagctggtcgtccatccagccaattccccgatcgcgaacaagaacccggacaatccgaaaaagaccaccaccctgtcctacgacgtctacaaggacaaacgcttcagcgaagaccagtacgaattacacatcccaattgcgattaataagtgcccaaagaatatcttcaaaattaatacagaggtcagggtgctgctcaaacacgacgacaatccgtatgtcatcggcattgacaggggcgagcgcaatctgctctatatcgtggtcgtggatgggaagggcaatattgtggagcagtactccctgaacgagattatcaacaacttcaatgggattaggattaagaccgactatcacagcctgctcgacaagaaagaaaaagagaggtttgaggcccgccaaaactggacctccattgagaatatcaaagaattaaaggccggctatatttcccaagtcgtccacaagatctgcgagctggtggagaaatatgacgccgtgattgcgctcgaagacttaaattctgggttcaagaactcccgcgtgaaggtggaaaaacaggtgtatcagaaattcgagaaaatgctgatcgacaaactcaattatatggtggataagaagtccaacccgtgtgccacagggggcgcgctgaagggctatcagatcaccaacaagttcgagagcttcaagagcatgagcacccagaacgggtttattttctacatcccggcgtggctcacctccaagattgacccgagcaccggcttcgtgaacctcctgaagacaaagtatacctccattgccgacagcaagaagtttatctcctccttcgaccgcattatgtatgtgccggaggaggacctcttcgagttcgccctcgactacaaaaacttcagccgcacagatgcggattacatcaagaagtggaagctgtactcctacgggaacaggatccgcatcttcaggaatccaaaaaaaaataacgtctttgactgggaggaagtgtgcctgacatccgcctacaaggaactgttcaataaatacggcatcaattaccagcagggcgacattcgcgccctcctctgtgagcagtccgacaaagcgttttactccagcttcatggccctcatgtccctgatgctccaaatgaggaatagcatcacagggcgcaccgacgtcgacttcctcatcagcccggtgaagaacggatctaagaagagaagaattaaacaagattgatagaagggctctctgtcatgatttcatactttcattattgagctctgtaattacaattatgaccatgagaacatctcttattgtgtggccttttaattgctgatgttagtactgaaccaaagcttatcgtgatgatgtaaaagcaataagtacttgtttgtagcttctttgtgtctccctttgggcttaatacatctgtttagtgttgtggctttggcatagacttctcttggtaataatgccttgcaatgcaaaatttcaattatcaaattctattatgttctcaccttatggtaacagcttaccctgtggaagatgagattcttgagttgagtcattgccaatttttggcattagcttttgaattagtgaattttgacaaaaattaccgtgacactgattttgttgaagctcttaagtgtagtttttacaaaatttcagtggctcgttgtgattatgtcaaactcacggcgaatgtagttcttacagaatttcagtggctcaaggatttaacgcgtgtatgcggccgcaaactatttaaatgcaggcgataaaaatgttttaaacgatatatattataaaaaaaaacgtttcaaaaataaatacaaaaatgtttttaaatatatataatttaactcattaaagaaaataaaaatgcaagtgcggtgacaagacaagctaaaagttgcaaaagaaatggcagggctataaggctcacctactcctggatttaccaaattttggttcgtccctatactcgaaaaataaaacaaaataaatttcagtatcttcgtttttgtatgctttgactgtgaggcgaggccaactttcttcttctgtctgagatgaattttgtttgcctcctgtgaaggatgtatcattcaaagtgaatgttttgcaactgccagtagtcccacatcgaccaaatattcttattacagtgtgtttatatagcacctggagaaggaatgggttgtttcaaagattaaataatttctactaagtgtagatcaagggactcaacatcaaaggattaatttctactaagtgtagatcaagggactcaacatcaaaggattaatttctactaagtgtagatcaagggactcaacatcaaaggattaatttctactaagtgtagatttttttttgcggccgcaacagagaaactagacctgcaggaaggcgccggcgctctcttaaggtagc

SEQ ID NO: 752 - DNA, 15555 bp, synthetic construct
  source 1..15555: mol_type = other DNA
cggccctgccggcgcgccactagtcaacaattggccaatctttgttctaaattgctaataaacgaccatttccgtcaattctccttggttgcaacagtctacccgtcaaatgtttactaatttataagtgtgaagtttgaattatgaaagacgaaatcgtattaaaaattcacaagaataaacaactccatagattttcaaaaaaacagtcacgagaaaaaaaccacagtccgtttgtctgctcttctagtttttattatttttctattaatagttttttgttatttcgagaataaaatttgaacgatgtccgaaccacaaaagccgagccgataaatcctaagccgagcctaactttagccgtaaccatcagtcacggctcccgggctaattcatttgaaccgaatcataatcaacggtttagatcaaactcaaaacaatctaacggcaacatagacgcgtcggtgagctaaaaagagtgtgaaagccaggtcaccatagcattgtctctcccagattttttatttgggaaataatagaagaaatagaaaaaaataaaagagtgagaaaaatcgtagagctatatattcgcacatgtactcgtttcgctttccttagtgttagctgctgccgctgttgtttctcctccatttctctatctttctctctcgctgcttctcgaatcttctgtatcatcttcttcttcttcaaggtgagtctctagatccgttcgcttgattttgctgctcgttagtcgttattgttgattctctatgccgatttcgctagatctgtttagcatgcgttgtggttttatgagaaaatctttgttttgggggttgcttgttatgtgattcgatccgtgcttgttggatcgatctgagctaattcttaaggtttatgtgttagatctatggagtttgaggattcttctcgcttctgtcgatctctcgctgttatttttgtttttttcagtgaagtgaagttgtttagttcgaaatgacttcgtgtatgctcgattgatctggttttaatcttcgatctgttaggtgttgatgtttacaagtgaattctagtgttttctcgttgagatctgtgaagtttgaacctagttttctcaataatcaacatatgaagcgatgtttgagtttcaataaacgctgctaatcttcgaaactaagttgtgatctgattcgtgtttacttcatgagcttatccaattcatttcggtttcattttactttttttttagtgaaccatggcgcaagttagcagaatctgcaatggtgtgcagaacccatctcttatctccaatctctcgaaatccagtcaacgcaaatctcccttatcggtttctctgaagacgcagcagcatccacgagcttatccgatttcgtcgtcgtggggattgaagaagagtgggatgacgttaattggctctgagcttcgtcctcttaaggtcatgtcttctgtttccacggcgtgcatgggggaagcggtgatcgccgaagtatcgactcaactatcagaggtagttggcgtcatcgagcgccatctcgaaccgacgttgctggccgtacatttgtacggctccgcagtggatggcggcctgaagccacacagtgatattgatttgctggttacggtgaccgtaaggcttgatgaaacaacgcggcgagctttgatcaacgaccttttggaaacttcggcttcccctggagagagcgagattctccgcgctgtagaagtcaccattgttgtgcacgacgacatcattccgtggcgttatccagctaagcgcgaactgcaatttggagaatggcagcgcaatgacattcttgcaggtatcttcgagccagccacgatcgacattgatctggctatcttgctgacaaaagcaagagaacatagcgttgccttggtaggtccagcggcggaggaactctttgatccggttcctgaacaggatctatttgaggcgctaaatgaaaccttaacgctatggaactcgccgcccgactgggctggcgatgagcgaaatgtagtgcttacgttgtcccgcatttggtacagcgcagtaaccggcaaaatcgcgccgaaggatgtcgctgccgactgggcaatggagcgcctgccggcccagtatcagcccgtcatacttgaagctagacaggcttatcttggacaagaagaagatcgcttggcctcgcgcgcagatcagttggaagaatttgtccactacgtgaaaggcgagatcaccaaggtagtcggcaaataaggatcaattcccgatcgttcaaacatttggcaataaagtttcttaagattgaatcctgttgccggtcttgcgatgattatcatataatttctgttgaattacgttaagcatgtaataattaacatgtaatgcatgacgttatttatgagatgggtttttatgattagagtcccgcaattatacatttaatacgcgatagaaaacaaaatatagcgcgcaaactaggataaattatcgcgcgcggtgtcatctatgttactagatcacgcgtgtatgcaatatcctgcagggtattaattaattatgccctaagacatcctggaccaatatgctgaagattatgctacctacaccaggataggacttgaagcacttaaccttgaagattggttcgaagaaccagaacccgatccacctaaccctgtggaccgccagaggatagaggacatcctggacctactgaacgtcagcaatgacgactgaaagattcccaggacaccggcggaagtggtggacccagtctaggtgcgatgcttagtcgcgcacgatgactatgtcggaaggcatctttgctttcggcaaactttagtaatactttaaggaaagtattgtacaagttaggtgcagagacaataatgcacccagctttagctttgtttatggaattattgtgtcggttgcattattggatgcctgcgtgcaccctaagcaatcaacggagaaacaaagataaaaatcaattactcacatgaaagagtattgatcacgagtcactatggagcgacaatctccagacaggatgtcagcatcttatcttcctttgaagaaagcatcatcaataacgatgtaatggtggggacatccactaagttattgctctgcaaacagctcaaaaagctactggccgacaatcataattgctcggcatgtccaggtggggcctccactagcaataatacaagctttacagcttgcagtgactcatcctccaataatggagaaaaagacgtcagcagtgacgaacaagggtcgaaagacttgcctatataagggcattctcccctcagttgaagatcatcgaaagttggagcaataaactctctcttcaacaaatctatcttttatcttttatcgccgcaatggcgggatctaagaagagaagaattaaacaagataaagacaagttcaagctgtacttccagaacccgcaatttatggggggctgggacaaggataaagagacagactaccgcgcgacaattctccgctatggctccaaatactatctggccatcatggacaagaagtacgcgaagtgcctgcagaagatcgacaaagacgacgtcaatggcaactatgaaaagatcaactacaagctgctgccgggcccgaacaagatgctcccgaaggtgttcttcagcaagaagtggatggcctactacaatccaagcgaggatattcagaaaatctataaaaacgggaccttcaagaagggggacatgtttaacctcaacgactgccacaagctcattgatttcttcaaggatagcatttcccgctacccgaaatggtccaatgcgtacgattttaacttctccgagacagaaaagtacaaagacatcgcgggcttttacagggaggtggaggagcaagggtataaagtttcttttgaatccgcgagcaagaaggaagtcgacaagctcgtcgaggagggcaagctctacatgttccaaatttataacaaggacttttccgacaagagccatgggaccccaaacctccacaccatgtacttcaaactgctctttgacgagaacaaccacgggcaaatcaggctgagcggcggcgccgaattattcatgcgcagggcctccctcaagaaggaagagctggtcgtccatccagccaattccccgatcgcgaacaagaacccggacaatccgaaaaagaccaccaccctgtcctacgacgtctacaaggacaaacgcttcagcgaagaccagtacgaattacacatcccaattgcgattaataagtgcccaaagaatatcttcaaaattaatacagaggtcagggtgctgctcaaacacgacgacaatccgtatgtcatcggcattgacaggggcgagcgcaatctgctctatatcgtggtcgtggatgggaagggcaatattgtggagcagtactccctgaacgagattatcaacaacttcaatgggattaggattaagaccgactatcacagcctgctcgacaagaaagaaaaagagaggtttgaggcccgccaaaactggacctccattgagaatatcaaagaattaaaggccggctatatttcccaagtcgtccacaagatctgcgagctggtggagaaatatgacgccgtgattgcgctcgaagacttaaattctgggttcaagaactcccgcgtgaaggtggaaaaacaggtgtatcagaaattcgagaaaatgctgatcgacaaactcaattatatggtggataagaagtccaacccgtgtgccacagggggcgcgctgaagggctatcagatcaccaacaagttcgagagcttcaagagcatgagcacccagaacgggtttattttctacatcccggcgtggctcacctccaagattgacccgagcaccggcttcgtgaacctcctgaagacaaagtatacctccattgccgacagcaagaagtttatctcctccttcgaccgcattatgtatgtgccggaggaggacctcttcgagttcgccctcgactacaaaaacttcagccgcacagatgcggattacatcaagaagtggaagctgtactcctacgggaacaggatccgcatcttcaggaatccaaaaaaaaataacgtctttgactgggaggaagtgtgcctgacatccgcctacaaggaactgttcaataaatacggcatcaattaccagcagggcgacattcgcgccctcctctgtgagcagtccgacaaagcgttttactccagcttcatggccctcatgtccctgatgctccaaatgaggaatagcatcacagggcgcaccgacgtcgacttcctcatcagcccggtgaagaactccgacgggatcttttacgactcccgcaactatgaggcgcaagagaatgcgatcctcccgaagaacgccgatgcgaacggggcctataatatcgccaggaaagtgctctgggccatcgggcagttcaaaaaggcggaggatgagaagctcgacaaggtgaaaattgccatttccaacaaggagtggctggagtacgcgcagacctccgtgaagcacggctcctctggcagctccggctctagcggctcctctggcagctccggctccaagctggagaagtttacaaactgttacagcctctccaaaaccctcaggtttaaagcgatcccggtgggcaagacccaggagaacatcgacaacaagaggctcctggtggaagacgagaagcgcgccgaagactacaagggcgtgaagaagctgctcgataggtactacctcagctttattaacgacgtgctgcacagcatcaaactcaagaatctcaacaactacatctccctcttccgcaaaaagacccgcaccgagaaggagaacaaggagctggagaacctggagatcaacctccgcaaggaaatcgccaaagcgttcaagggcaatgaagggtacaagagcctcttcaagaaagacatcatcgaaactatcctcccagagtttctcgatgacaaggacgagatcgcgctggtgaactcctttaacgggttcacaaccgcgtttaccggcttctttaggaacagggaaaatatgttctccgaggaggccaagtccaccagcatcgccttcaggtgtatcaacgagaacctcacccgctacatttccaatatggacattttcgagaaggtggatgcgatcttcgataagcacgaggtgcaggagatcaaagagaagattctcaattccgattatgacgtcgaggatttcttcgaaggggagttctttaattttgtgctcacacaagagggcattgacgtgtacaacgcgattatcgggggcttcgtcacagagtccggggagaagattaaggggctgaatgagtacatcaatctgtacaatcagaagaccaagcagaaactgccgaaattcaagccgctctacaagcaagtcctgtccgatagggaaagcctctccttctacggcgagggctataccagcgacgaggaggtgctggaagtcttccgcaacacactgaataagaatagcgagattttctcctccatcaagaagctcgagaagctctttaagaactttgacgagtacagctccgccgggattttcgtgaagaacgggccggcgatcagcaccatctccaaggacatctttggcgagtggaacgtcatcagggacaagtggaacgccgagtacgacgacatccacctgaagaagaaggcggtggtgaccgagaagtatgaggacgatcgcaggaagtccttcaaaaaaatcggctccttcagcctcgaacagctccaggagtatgccgatgcggatctgtccgtcgtcgagaagctgaaggaaatcatcattcagaaggtcgacgagatctataaagtgtacgggtccagcgagaagctgttcgacgccgactttgtgctcgagaagtccctcaaaaagaatgacgccgtggtggccattatgaaagacctgctcgactccgtgaagtccttcgaaaattacattaaagcgttctttggggaggggaaggaaactaacagggatgagtccttctatggcgactttgtcctcgcgtacgacatcctgctgaaggtcgaccacatttacgacgcgatccgcaactacgtgacacagaagccgtactccggatctaagaagagaagaattaaacaagattgatagaagggctctctgtcatgatttcatactttcattattgagctctgtaattacaattatgaccatgagaacatctcttattgtgtggccttttaattgctgatgttagtactgaaccaaagcttatcgtgatgatgtaaaagcaataagtacttgtttgtagcttctttgtgtctccctttgggcttaatacatctgtttagtgttgtggctttggcatagacttctcttggtaataatgccttgcaatgcaaaatttcaattatcaaattctattatgttctcaccttatggtaacagcttaccctgtggaagatgagattcttgagttgagtcattgccaatttttggcattagcttttgaattagtgaattttgacaaaaattaccgtgacactgattttgttgaagctcttaagtgtagtttttacaaaatttcagtggctcgttgtgattatgtcaaactcacggcgaatgtagttcttacagaatttcagtggctcaaggatttaacgcgtgtatgcggccgcaaactatttaaatgcaggcgataaaaatgttttaaacgatatatattataaaaaaaaacgtttcaaaaataaatacaaaaatgtttttaaatatatataatttaactcattaaagaaaataaaaatgcaagtgcggtgacaagacaagctaaaagttgcaaaagaaatggcagggctataaggctcacctactcctggatttaccaaattttggttcgtccctatactcgaaaaataaaacaaaataaatttcagtatcttcgtttttgtatgctttgactgtgaggcgaggccaactttcttcttctgtctgagatgaattttgtttgcctcctgtgaaggatgtatcattcaaagtgaatgttttgcaactgccagtagtcccacatcgaccaaatattcttattacagtgtgtttatatagcacctggagaaggaatgggttgtttcaaagattaaataatttctactaagtgtagatcaagggactcaacatcaaaggattaatttctactaagtgtagatcaagggactcaacatcaaaggattaatttctactaagtgtagatcaagggactcaacatcaaaggattaatttctactaagtgtagatttttttttgcggccgcaacagagaaactagacctgcaggaaggcgccggcgctctcttaaggtagcaaggatccctgaaagcgacgttggatgttaacatctacaaattgccttttcttatcgaccatgtacgtaagcgcttacgtttttggtggacccttgaggaaactggtagctgttgtgggcctgtggactcaagatggatcattaatttccaccttcacctacgatggggggcatcgcaccggtgagtaatattgtacggctaagagcgaatttggcctgtagacctcaattgcgagctttctaatttcaaactattcgggcctaacttttggtgtgatgatgctgactggcaggatatataccgttgtaatttgagctcgtgtgaataagtcgctgtgtatgtttgtttgattgtttctgttggagtgcagcccatttcaccggacaagtcggctagattgatttagccctgatgaactgccgaggggaagccatcttgagcgcggaatgggaatggatttcgttgtacaacgacacgacagaacacccacgggaccgagcttcgaagctttaacgcttgagttaagccgcgccgcgaagcggcgtcggcttgaacgaattgttagacatcagaagaactcgtcaagaaggcgatagaaggcgatgcgctgcgaatcgggagcggcgataccgtaaagcacgaggaagcggtcagcccattcgccgccaagctcttcagcaatatcacgggtagccaacgctatgtcctgatagcggtccgccacacccagccggccacagtcgatgaatccagaaaagcggccattttccaccatgatattcggcaagcaggcatcgccatgggtcacgacgagatcctcgccgtcgggcatgcgcgccttgagcctggcgaacagttcggctggcgcgagcccctgatgctcttcgtccagatcatcctgatcgacaagaccggcttccatccgagtacgtgctcgctcgatgcgatgtttcgcttggtggtcgaatgggcaggtagccggatcaagcgtatgcagccgccgcattgcatcagccatgatggatactttctcggcaggagcaaggtgagatgacaggagatcctgccccggcacttcgcccaatagcagccagtcccttcccgcttcagtgacaacgtcgagcacagctgcgcaaggaacgcccgtcgtggccagccacgatagccgcgctgcctcgtcctgcagttcattcagggcaccggacaggtcggtcttgacaaaaagaaccgggcgcccctgcgctgacagccggaacacggcggcatcagagcagccgattgtctgttgtgcccagtcatagccgaatagcctctccacccaagcggccggagaacctgcgtgcaatccatcttgttcaatcatggctttgtttctccttcaatcattgactattgtcacgttattctgaatcgacgagaactcacatcaatctcaacaagcatctctgctcgcgaaattggtgttgtctcattaaaacgtgaccgtcaaagtctattcactaggacccaaatctctccaggtcccgcaagctagcttcgccgcccacgtttctctttcttctcatattcaattgtcaaaaaacagacctcatgaccaaaatcccttaacgtgagttttcgttccactgagcgtcagaccccgtagaaaagatcaaaggatcttcttgagatcctttttttctgcgcgtaatctgctgcttgcaaacaaaaaaaccaccgctaccagcggtggtttgtttgccggatcaagagctaccaactttttttccgaaggtaactggcttcagcagagcgcagataccaaatactgtccttctagtgtagccgtagttaggccaccacttcaagaactctgtagcaccgcctacatacctcgctctgctaatcctgttaccagtggctgctgccagtggcgataagtcgtgtcttaccgggttggactcaagacgatagttaccggataaggcgcagcggtcgggctgaacggggggttcgtgcacacagcccagcttggagcgaacgacctacaccgaactgagatacctacagcgtgagctatgagaaagcgccacgcttcccgaagggagaaaggcggacaggtatccggtaagcggcagggtcggaacaggagagcgcacgagggagcttccagggggaaacgcctggtatctttatagtcctgtcgggtttcgccacctctgacttgagcgtcgatttttgtgatgctcgtcaggggggcggagcctatggaaaaacgccagcaacgcggcctttttacggttcctggccttttgctggccttttgctcacatgttctttcctgcgttatcccctgattctgtggataaccgtattaccgcctttgagtgagctgataccgctcgccgcagccgaacgaccgagcgcagcgagtcagtgagcgaggaagcggaagagcgcctgatgcggtattttctccttacgcatctgtgcggtatttcacaccgcatatggtgcactctcagtacaatctgctctgatgccgcatagttaagccagtatacaggctctccttcacgatcaacgatcggcatggggccttcgtgcttgttgagtaatgttatcgctcccatcagagcacgcttggtactccgggaatcggatggtctgtcgatcatccaaaaaacgctcatgttttcaacctattaggtctgtggtcagctgaccacagaccatcctgctccatactcgctaattctagccaaaccgcaacgtcccctgcccgctagccttcaagagcgccattatcatcgggccaagtgaaaacttcccgagctcgctccgccgtgtcagatctcggagatagcccccgggcgaattgatgaagttcgctcgctccaaaatgcacgccatcgctgctgccgcattctccggtcccattgcctcacacgcgtcttggtaagccgacgggctgacccccagcatagaccgaaccaccaccgcagccgacatgaggtcacgccagctagcaaccgcaccgctcggcccataattgccaatggtcgggcatgctttcaggatcatcccgagggggaacgcttttatcggctcgctccttgcccggtctatttcactcggcttagcgccctgctccttttcagagcgaggttcaagttcattaacggattcgggttttgaattctgtatgtgctgctcgctctgggcagcattggtgctattattttctgaattgtctctaatttccaaccggttgattatctcttcctggagcatccacatctcttcgagaattgactctacatcagcaagcgtcggggcgcgtggaattctacccacaagttccacatagacttcctcgacagcttgccagtcgccctccgctccctcttccatagctgccgtaattagcttccgaacgtcccgtcggcaaatcgtcagactttctttggccatcctgaatgctgctcgatcggccatcacttgctgtgccatcatcgctagctcttcggaccgcgcgagaagcggagacaaatcgaagccaaacgcgcgctcgatctgaccagcgccatccttacgagcgtaacgctttccgttggcgctatccttccggacgatcaagcctgactccacgagcatggcgatgtgcctacgcaaagtcgcgccagccatcccatgcgcccgaagggcaagctgagcattcgacgggaagacgatcagctgtgcctcctgacgcaactccgtttccgggtgaaagctcaatagcgcatcaaggacggcaagactgttggactggattccaagtagttccatggccgcggacgcatctctaaagaccttccacttgtccgctgtcttgccttgtttgatatcggccagcgccgtctggcgccgcacaagcgcaagcgtcattggccgccgcccgaatggcgtcgttacacttcctgtctgcatcatctttcacctttcagcaggcaaaggaaatcagctcaccaaaacggcgctaaaaactcttgacgaggattcgaggaaatgcgattctgttcgcgctagagagacagaagggcttccgcgacggcgacgttgagggggctcttttcttttgcggtttactctccccgtttccgttggttctcagcgtggtacgcttgatacagcgctggcacatgatcgagcacgaaggtcgcaaaatcgggcgtcgccttcctgtcaatcgtgatttccagtttggccttgctctgcgtcacctgtgcaattctggtgccgtctggggtggccatgacctcgggaagtccacgcgcaacccgactgggcttcagactagcgatcaccgccttgaatcgttctgccgatggcagcgcttgaacttcctccgacatagcatatttagccacgtcggccggtgaagaaactttctcaatcagctcggcaagttgttgccaactcggccgtccaacaccaggagcggcaccaatagcatcggtcagttcagaggggagggcgtcgacgagcagaagcatcttggacaaattgctcttgtcgatcgacatcgcggcgatgacaatctctcgagaaaactgcctgttcaggcgatgtgcgaagcgcgccttttcgatgaaggtaagatcttcgcgctcattgttttcctgaccctgtgctacgaccacttgctcgtccgtcagttcgcgaacgaccgctctgaccggaagtccgagttctgaaacggcgcgtagccggcggtggccgaaggcaacctgatatcggcccggctggctcggatgcggtcgcacaaggattgggacttgctgtccttgttcccggatcgaagtaaggagcccgtcaatgtcccctcgcatacgatcctgcacgaaagacggttctattgacgaggcatccaactctatcactgcctgaccttcagcgaggcgccgctcgatctcttcggcacggctaagacgatcgttttgctctcgcagtgcgttaccaatgttcgctgtgagcttcgttgccggatcgcgctccttccttgttacgccgaggagcggcatggagcggttctttgccgtcctattgtcggcgggcgacgtttcaggggcgtcagttgacacgccaaggatgtgcttccggctcatgtgggcctaccccatgcttttttgatcagtgtttcgatctcgtcgttgacggcgttcatcgcctccaaggctcgatcataggtcgagcgcgtgaacaggccacgctccacttcgaatagagtctggtttgtcaggccagcgtccgaaaccgcggtggttttaagcatcggaaaattgaggacattttcgccaaaaatcgaccgcagataacctaccatttggttctgtggtccgtcgctcggttcgaaacgggttatcagatagcgcatccaattaaacttgaacttggcgccagcattctcgatttcacgcaaaaggttcgatgtcattgccagaaactggttcatcgacatcacatccagcatctgcggatggaccgtgacaagaatggacgtcgccgcagtcaatgcggatagcgtgagatacccaagctggggagggcagtcgatgaccacgacgtcatagttatccgcgatatcttcaattacttggctgatgcgaccataaaagagcgtgtcgccctctttgcggttcatcagcgcgcgtggcgtatcgtgttcaaactccatcagctcaaggttaccaggaatcaggtggaggtcgggaatgtaagtccctcggacgactcgttcgattgccacttgctcatcatcataccttatagcgccgtagagcgtttcgttcgggccaacgtccgtttccggttggctcccaaagagtgcagaaaggctcgcttgaggatcgagatcaatggccaagactcgatatccgcgcatagcgaggtactgcgccagatgcgcggcggtggtggtcttacccgacccacctttgaaattcatcacagagataacctgaagctgctcgccgcctcgacgatgtggcaggtagcgccggttcccgcggccgacctgatccatatacttccgaatcacatggatatcttcaattgagaacattcgcctgccacccgggctcatgctaacattcaactctggcatctcagacgcggtctgccgtaaatatgactcgccaacgccgagcagcttggacgcctccgatggcccgaatgttcgaatgcccttctcggaatgcggcgggaaaaccttaagatgatgtgcttgaagttggctcgagagggcatcggcatgacgctccatcaaggccgtcaaccctacaactacaggcgctgcttttaggacagacttcgccatctcaaacccattccttgccagtggcgatatttttcgcgaaactggaaaagttccgccgctggcaattagcgccgattctgctgtttgggcaagagcttttaggttaacagaaggttaacgccctcaggtcgaaaaactccacccaactgttatttgtatttatttccaatgccttagagagattgccatttgaatatgttcatgtattgttttagtgataatcctacaatcgtaacccaaaaagaggtcgccctctgcgcgccgtcgtccaatataggcgaagtcacccttgcgactcaggcggattctaccttgtacacgtgtcgagtggaaaagtcccatgtggatcactccgttgccccgtcgctcaccgtgttggggggaaggtgcacatggctcagttctcaatggaaattatctgcctaaccggctcagttctgcgtagaaaccaacatgcaagctccaccgggtgcaaagcggcagcggcggcaggatatattcaattgtaaatggcttcatgtccgggaaatctacatggatcagcaatgagtatgatggtcaatatggagaaaaagaaagagtaattaccaattttttttcaattcaaaaatgtagatgtccgcagcgttattataaaatgaaagtacattttgataaaacgacaaattacgatccgtcgtatttataggcgaaagcaataaacaaattattctaattcggaaatctttatttcgacgtgtctacattcacgtccaaatgggggcttagatgagaaacttcacgatcgatg

SEQ ID NO: 753 - DNA, 15555 bp, synthetic construct
  source 1..15555: mol_type = other DNA
aaggatccctgaaagcgacgttggatgttaacatctacaaattgccttttcttatcgaccatgtacgtaagcgcttacgtttttggtggacccttgaggaaactggtagctgttgtgggcctgtggactcaagatggatcattaatttccaccttcacctacgatggggggcatcgcaccggtgagtaatattgtacggctaagagcgaatttggcctgtagacctcaattgcgagctttctaatttcaaactattcgggcctaacttttggtgtgatgatgctgactggcaggatatataccgttgtaatttgagctcgtgtgaataagtcgctgtgtatgtttgtttgattgtttctgttggagtgcagcccatttcaccggacaagtcggctagattgatttagccctgatgaactgccgaggggaagccatcttgagcgcggaatgggaatggatttcgttgtacaacgacacgacagaacacccacgggaccgagcttcgaagctttaacgcttgagttaagccgcgccgcgaagcggcgtcggcttgaacgaattgttagacatcagaagaactcgtcaagaaggcgatagaaggcgatgcgctgcgaatcgggagcggcgataccgtaaagcacgaggaagcggtcagcccattcgccgccaagctcttcagcaatatcacgggtagccaacgctatgtcctgatagcggtccgccacacccagccggccacagtcgatgaatccagaaaagcggccattttccaccatgatattcggcaagcaggcatcgccatgggtcacgacgagatcctcgccgtcgggcatgcgcgccttgagcctggcgaacagttcggctggcgcgagcccctgatgctcttcgtccagatcatcctgatcgacaagaccggcttccatccgagtacgtgctcgctcgatgcgatgtttcgcttggtggtcgaatgggcaggtagccggatcaagcgtatgcagccgccgcattgcatcagccatgatggatactttctcggcaggagcaaggtgagatgacaggagatcctgccccggcacttcgcccaatagcagccagtcccttcccgcttcagtgacaacgtcgagcacagctgcgcaaggaacgcccgtcgtggccagccacgatagccgcgctgcctcgtcctgcagttcattcagggcaccggacaggtcggtcttgacaaaaagaaccgggcgcccctgcgctgacagccggaacacggcggcatcagagcagccgattgtctgttgtgcccagtcatagccgaatagcctctccacccaagcggccggagaacctgcgtgcaatccatcttgttcaatcatggctttgtttctccttcaatcattgactattgtcacgttattctgaatcgacgagaactcacatcaatctcaacaagcatctctgctcgcgaaattggtgttgtctcattaaaacgtgaccgtcaaagtctattcactaggacccaaatctctccaggtcccgcaagctagcttcgccgcccacgtttctctttcttctcatattcaattgtcaaaaaacagacctcatgaccaaaatcccttaacgtgagttttcgttccactgagcgtcagaccccgtagaaaagatcaaaggatcttcttgagatcctttttttctgcgcgtaatctgctgcttgcaaacaaaaaaaccaccgctaccagcggtggtttgtttgccggatcaagagctaccaactttttttccgaaggtaactggcttcagcagagcgcagataccaaatactgtccttctagtgtagccgtagttaggccaccacttcaagaactctgtagcaccgcctacatacctcgctctgctaatcctgttaccagtggctgctgccagtggcgataagtcgtgtcttaccgggttggactcaagacgatagttaccggataaggcgcagcggtcgggctgaacggggggttcgtgcacacagcccagcttggagcgaacgacctacaccgaactgagatacctacagcgtgagctatgagaaagcgccacgcttcccgaagggagaaaggcggacaggtatccggtaagcggcagggtcggaacaggagagcgcacgagggagcttccagggggaaacgcctggtatctttatagtcctgtcgggtttcgccacctctgacttgagcgtcgatttttgtgatgctcgtcaggggggcggagcctatggaaaaacgccagcaacgcggcctttttacggttcctggccttttgctggccttttgctcacatgttctttcctgcgttatcccctgattctgtggataaccgtattaccgcctttgagtgagctgataccgctcgccgcagccgaacgaccgagcgcagcgagtcagtgagcgaggaagcggaagagcgcctgatgcggtattttctccttacgcatctgtgcggtatttcacaccgcatatggtgcactctcagtacaatctgctctgatgccgcatagttaagccagtatacaggctctccttcacgatcaacgatcggcatggggccttcgtgcttgttgagtaatgttatcgctcccatcagagcacgcttggtactccgggaatcggatggtctgtcgatcatccaaaaaacgctcatgttttcaacctattaggtctgtggtcagctgaccacagaccatcctgctccatactcgctaattctagccaaaccgcaacgtcccctgcccgctagccttcaagagcgccattatcatcgggccaagtgaaaacttcccgagctcgctccgccgtgtcagatctcggagatagcccccgggcgaattgatgaagttcgctcgctccaaaatgcacgccatcgctgctgccgcattctccggtcccattgcctcacacgcgtcttggtaagccgacgggctgacccccagcatagaccgaaccaccaccgcagccgacatgaggtcacgccagctagcaaccgcaccgctcggcccataattgccaatggtcgggcatgctttcaggatcatcccgagggggaacgcttttatcggctcgctccttgcccggtctatttcactcggcttagcgccctgctccttttcagagcgaggttcaagttcattaacggattcgggttttgaattctgtatgtgctgctcgctctgggcagcattggtgctattattttctgaattgtctctaatttccaaccggttgattatctcttcctggagcatccacatctcttcgagaattgactctacatcagcaagcgtcggggcgcgtggaattctacccacaagttccacatagacttcctcgacagcttgccagtcgccctccgctccctcttccatagctgccgtaattagcttccgaacgtcccgtcggcaaatcgtcagactttctttggccatcctgaatgctgctcgatcggccatcacttgctgtgccatcatcgctagctcttcggaccgcgcgagaagcggagacaaatcgaagccaaacgcgcgctcgatctgaccagcgccatccttacgagcgtaacgctttccgttggcgctatccttccggacgatcaagcctgactccacgagcatggcgatgtgcctacgcaaagtcgcgccagccatcccatgcgcccgaagggcaagctgagcattcgacgggaagacgatcagctgtgcctcctgacgcaactccgtttccgggtgaaagctcaatagcgcatcaaggacggcaagactgttggactggattccaagtagttccatggccgcggacgcatctctaaagaccttccacttgtccgctgtcttgccttgtttgatatcggccagcgccgtctggcgccgcacaagcgcaagcgtcattggccgccgcccgaatggcgtcgttacacttcctgtctgcatcatctttcacctttcagcaggcaaaggaaatcagctcaccaaaacggcgctaaaaactcttgacgaggattcgaggaaatgcgattctgttcgcgctagagagacagaagggcttccgcgacggcgacgttgagggggctcttttcttttgcggtttactctccccgtttccgttggttctcagcgtggtacgcttgatacagcgctggcacatgatcgagcacgaaggtcgcaaaatcgggcgtcgccttcctgtcaatcgtgatttccagtttggccttgctctgcgtcacctgtgcaattctggtgccgtctggggtggccatgacctcgggaagtccacgcgcaacccgactgggcttcagactagcgatcaccgccttgaatcgttctgccgatggcagcgcttgaacttcctccgacatagcatatttagccacgtcggccggtgaagaaactttctcaatcagctcggcaagttgttgccaactcggccgtccaacaccaggagcggcaccaatagcatcggtcagttcagaggggagggcgtcgacgagcagaagcatcttggacaaattgctcttgtcgatcgacatcgcggcgatgacaatctctcgagaaaactgcctgttcaggcgatgtgcgaagcgcgccttttcgatgaaggtaagatcttcgcgctcattgttttcctgaccctgtgctacgaccacttgctcgtccgtcagttcgcgaacgaccgctctgaccggaagtccgagttctgaaacggcgcgtagccggcggtggccgaaggcaacctgatatcggcccggctggctcggatgcggtcgcacaaggattgggacttgctgtccttgttcccggatcgaagtaaggagcccgtcaatgtcccctcgcatacgatcctgcacgaaagacggttctattgacgaggcatccaactctatcactgcctgaccttcagcgaggcgccgctcgatctcttcggcacggctaagacgatcgttttgctctcgcagtgcgttaccaatgttcgctgtgagcttcgttgccggatcgcgctccttccttgttacgccgaggagcggcatggagcggttctttgccgtcctattgtcggcgggcgacgtttcaggggcgtcagttgacacgccaaggatgtgcttccggctcatgtgggcctaccccatgcttttttgatcagtgtttcgatctcgtcgttgacggcgttcatcgcctccaaggctcgatcataggtcgagcgcgtgaacaggccacgctccacttcgaatagagtctggtttgtcaggccagcgtccgaaaccgcggtggttttaagcatcggaaaattgaggacattttcgccaaaaatcgaccgcagataacctaccatttggttctgtggtccgtcgctcggttcgaaacgggttatcagatagcgcatccaattaaacttgaacttggcgccagcattctcgatttcacgcaaaaggttcgatgtcattgccagaaactggttcatcgacatcacatccagcatctgcggatggaccgtgacaagaatggacgtcgccgcagtcaatgcggatagcgtgagatacccaagctggggagggcagtcgatgaccacgacgtcatagttatccgcgatatcttcaattacttggctgatgcgaccataaaagagcgtgtcgccctctttgcggttcatcagcgcgcgtggcgtatcgtgttcaaactccatcagctcaaggttaccaggaatcaggtggaggtcgggaatgtaagtccctcggacgactcgttcgattgccacttgctcatcatcataccttatagcgccgtagagcgtttcgttcgggccaacgtccgtttccggttggctcccaaagagtgcagaaaggctcgcttgaggatcgagatcaatggccaagactcgatatccgcgcatagcgaggtactgcgccagatgcgcggcggtggtggtcttacccgacccacctttgaaattcatcacagagataacctgaagctgctcgccgcctcgacgatgtggcaggtagcgccggttcccgcggccgacctgatccatatacttccgaatcacatggatatcttcaattgagaacattcgcctgccacccgggctcatgctaacattcaactctggcatctcagacgcggtctgccgtaaatatgactcgccaacgccgagcagcttggacgcctccgatggcccgaatgttcgaatgcccttctcggaatgcggcgggaaaaccttaagatgatgtgcttgaagttggctcgagagggcatcggcatgacgctccatcaaggccgtcaaccctacaactacaggcgctgcttttaggacagacttcgccatctcaaacccattccttgccagtggcgatatttttcgcgaaactggaaaagttccgccgctggcaattagcgccgattctgctgtttgggcaagagcttttaggttaacagaaggttaacgccctcaggtcgaaaaactccacccaactgttatttgtatttatttccaatgccttagagagattgccatttgaatatgttcatgtattgttttagtgataatcctacaatcgtaacccaaaaagaggtcgccctctgcgcgccgtcgtccaatataggcgaagtcacccttgcgactcaggcggattctaccttgtacacgtgtcgagtggaaaagtcccatgtggatcactccgttgccccgtcgctcaccgtgttggggggaaggtgcacatggctcagttctcaatggaaattatctgcctaaccggctcagttctgcgtagaaaccaacatgcaagctccaccgggtgcaaagcggcagcggcggcaggatatattcaattgtaaatggcttcatgtccgggaaatctacatggatcagcaatgagtatgatggtcaatatggagaaaaagaaagagtaattaccaattttttttcaattcaaaaatgtagatgtccgcagcgttattataaaatgaaagtacattttgataaaacgacaaattacgatccgtcgtatttataggcgaaagcaataaacaaattattctaattcggaaatctttatttcgacgtgtctacattcacgtccaaatgggggcttagatgagaaacttcacgatcgatgcggccctgccggcgcgccactagtcaacaattggccaatctttgttctaaattgctaataaacgaccatttccgtcaattctccttggttgcaacagtctacccgtcaaatgtttactaatttataagtgtgaagtttgaattatgaaagacgaaatcgtattaaaaattcacaagaataaacaactccatagattttcaaaaaaacagtcacgagaaaaaaaccacagtccgtttgtctgctcttctagtttttattatttttctattaatagttttttgttatttcgagaataaaatttgaacgatgtccgaaccacaaaagccgagccgataaatcctaagccgagcctaactttagccgtaaccatcagtcacggctcccgggctaattcatttgaaccgaatcataatcaacggtttagatcaaactcaaaacaatctaacggcaacatagacgcgtcggtgagctaaaaagagtgtgaaagccaggtcaccatagcattgtctctcccagattttttatttgggaaataatagaagaaatagaaaaaaataaaagagtgagaaaaatcgtagagctatatattcgcacatgtactcgtttcgctttccttagtgttagctgctgccgctgttgtttctcctccatttctctatctttctctctcgctgcttctcgaatcttctgtatcatcttcttcttcttcaaggtgagtctctagatccgttcgcttgattttgctgctcgttagtcgttattgttgattctctatgccgatttcgctagatctgtttagcatgcgttgtggttttatgagaaaatctttgttttgggggttgcttgttatgtgattcgatccgtgcttgttggatcgatctgagctaattcttaaggtttatgtgttagatctatggagtttgaggattcttctcgcttctgtcgatctctcgctgttatttttgtttttttcagtgaagtgaagttgtttagttcgaaatgacttcgtgtatgctcgattgatctggttttaatcttcgatctgttaggtgttgatgtttacaagtgaattctagtgttttctcgttgagatctgtgaagtttgaacctagttttctcaataatcaacatatgaagcgatgtttgagtttcaataaacgctgctaatcttcgaaactaagttgtgatctgattcgtgtttacttcatgagcttatccaattcatttcggtttcattttactttttttttagtgaaccatggcgcaagttagcagaatctgcaatggtgtgcagaacccatctcttatctccaatctctcgaaatccagtcaacgcaaatctcccttatcggtttctctgaagacgcagcagcatccacgagcttatccgatttcgtcgtcgtggggattgaagaagagtgggatgacgttaattggctctgagcttcgtcctcttaaggtcatgtcttctgtttccacggcgtgcatgggggaagcggtgatcgccgaagtatcgactcaactatcagaggtagttggcgtcatcgagcgccatctcgaaccgacgttgctggccgtacatttgtacggctccgcagtggatggcggcctgaagccacacagtgatattgatttgctggttacggtgaccgtaaggcttgatgaaacaacgcggcgagctttgatcaacgaccttttggaaacttcggcttcccctggagagagcgagattctccgcgctgtagaagtcaccattgttgtgcacgacgacatcattccgtggcgttatccagctaagcgcgaactgcaatttggagaatggcagcgcaatgacattcttgcaggtatcttcgagccagccacgatcgacattgatctggctatcttgctgacaaaagcaagagaacatagcgttgccttggtaggtccagcggcggaggaactctttgatccggttcctgaacaggatctatttgaggcgctaaatgaaaccttaacgctatggaactcgccgcccgactgggctggcgatgagcgaaatgtagtgcttacgttgtcccgcatttggtacagcgcagtaaccggcaaaatcgcgccgaaggatgtcgctgccgactgggcaatggagcgcctgccggcccagtatcagcccgtcatacttgaagctagacaggcttatcttggacaagaagaagatcgcttggcctcgcgcgcagatcagttggaagaatttgtccactacgtgaaaggcgagatcaccaaggtagtcggcaaataaggatcaattcccgatcgttcaaacatttggcaataaagtttcttaagattgaatcctgttgccggtcttgcgatgattatcatataatttctgttgaattacgttaagcatgtaataattaacatgtaatgcatgacgttatttatgagatgggtttttatgattagagtcccgcaattatacatttaatacgcgatagaaaacaaaatatagcgcgcaaactaggataaattatcgcgcgcggtgtcatctatgttactagatcacgcgtgtatgcaatatcctgcagggtattaattaattatgccctaagacatcctggaccaatatgctgaagattatgctacctacaccaggataggacttgaagcacttaaccttgaagattggttcgaagaaccagaacccgatccacctaaccctgtggaccgccagaggatagaggacatcctggacctactgaacgtcagcaatgacgactgaaagattcccaggacaccggcggaagtggtggacccagtctaggtgcgatgcttagtcgcgcacgatgactatgtcggaaggcatctttgctttcggcaaactttagtaatactttaaggaaagtattgtacaagttaggtgcagagacaataatgcacccagctttagctttgtttatggaattattgtgtcggttgcattattggatgcctgcgtgcaccctaagcaatcaacggagaaacaaagataaaaatcaattactcacatgaaagagtattgatcacgagtcactatggagcgacaatctccagacaggatgtcagcatcttatcttcctttgaagaaagcatcatcaataacgatgtaatggtggggacatccactaagttattgctctgcaaacagctcaaaaagctactggccgacaatcataattgctcggcatgtccaggtggggcctccactagcaataatacaagctttacagcttgcagtgactcatcctccaataatggagaaaaagacgtcagcagtgacgaacaagggtcgaaagacttgcctatataagggcattctcccctcagttgaagatcatcgaaagttggagcaataaactctctcttcaacaaatctatcttttatcttttatcgccgcaatggcgggatctaagaagagaagaattaaacaagataagtccctcaaaaagaatgacgccgtggtggccattatgaaagacctgctcgactccgtgaagtccttcgaaaattacattaaagcgttctttggggaggggaaggaaactaacagggatgagtccttctatggcgactttgtcctcgcgtacgacatcctgctgaaggtcgaccacatttacgacgcgatccgcaactacgtgacacagaagccgtactccaaagacaagttcaagctgtacttccagaacccgcaatttatggggggctgggacaaggataaagagacagactaccgcgcgacaattctccgctatggctccaaatactatctggccatcatggacaagaagtacgcgaagtgcctgcagaagatcgacaaagacgacgtcaatggcaactatgaaaagatcaactacaagctgctgccgggcccgaacaagatgctcccgaaggtgttcttcagcaagaagtggatggcctactacaatccaagcgaggatattcagaaaatctataaaaacgggaccttcaagaagggggacatgtttaacctcaacgactgccacaagctcattgatttcttcaaggatagcatttcccgctacccgaaatggtccaatgcgtacgattttaacttctccgagacagaaaagtacaaagacatcgcgggcttttacagggaggtggaggagcaagggtataaagtttcttttgaatccgcgagcaagaaggaagtcgacaagctcgtcgaggagggcaagctctacatgttccaaatttataacaaggacttttccgacaagagccatgggaccccaaacctccacaccatgtacttcaaactgctctttgacgagaacaaccacgggcaaatcaggctgagcggcggcgccgaattattcatgcgcagggcctccctcaagaaggaagagctggtcgtccatccagccaattccccgatcgcgaacaagaacccggacaatccgaaaaagaccaccaccctgtcctacgacgtctacaaggacaaacgcttcagcgaagaccagtacgaattacacatcccaattgcgattaataagtgcccaaagaatatcttcaaaattaatacagaggtcagggtgctgctcaaacacgacgacaatccgtatgtcatcggcattgacaggggcgagcgcaatctgctctatatcgtggtcgtggatgggaagggcaatattgtggagcagtactccctgaacgagattatcaacaacttcaatgggattaggattaagaccgactatcacagcctgctcgacaagaaagaaaaagagaggtttgaggcccgccaaaactggacctccattgagaatatcaaagaattaaaggccggctatatttcccaagtcgtccacaagatctgcgagctggtggagaaatatgacgccgtgattgcgctcgaagacttaaattctgggttcaagaactcccgcgtgaaggtggaaaaacaggtgtatcagaaattcgagaaaatgctgatcgacaaactcaattatatggtggataagaagtccaacccgtgtgccacagggggcgcgctgaagggctatcagatcaccaacaagttcgagagcttcaagagcatgagcacccagaacgggtttattttctacatcccggcgtggctcacctccaagattgacccgagcaccggcttcgtgaacctcctgaagacaaagtatacctccattgccgacagcaagaagtttatctcctccttcgaccgcattatgtatgtgccggaggaggacctcttcgagttcgccctcgactacaaaaacttcagccgcacagatgcggattacatcaagaagtggaagctgtactcctacgggaacaggatccgcatcttcaggaatccaaaaaaaaataacgtctttgactgggaggaagtgtgcctgacatccgcctacaaggaactgttcaataaatacggcatcaattaccagcagggcgacattcgcgccctcctctgtgagcagtccgacaaagcgttttactccagcttcatggccctcatgtccctgatgctccaaatgaggaatagcatcacagggcgcaccgacgtcgacttcctcatcagcccggtgaagaactccgacgggatcttttacgactcccgcaactatgaggcgcaagagaatgcgatcctcccgaagaacgccgatgcgaacggggcctataatatcgccaggaaagtgctctgggccatcgggcagttcaaaaaggcggaggatgagaagctcgacaaggtgaaaattgccatttccaacaaggagtggctggagtacgcgcagacctccgtgaagcacggctcctctggcagctccggctctagcggctcctctggcagctccggctccaagctggagaagtttacaaactgttacagcctctccaaaaccctcaggtttaaagcgatcccggtgggcaagacccaggagaacatcgacaacaagaggctcctggtggaagacgagaagcgcgccgaagactacaagggcgtgaagaagctgctcgataggtactacctcagctttattaacgacgtgctgcacagcatcaaactcaagaatctcaacaactacatctccctcttccgcaaaaagacccgcaccgagaaggagaacaaggagctggagaacctggagatcaacctccgcaaggaaatcgccaaagcgttcaagggcaatgaagggtacaagagcctcttcaagaaagacatcatcgaaactatcctcccagagtttctcgatgacaaggacgagatcgcgctggtgaactcctttaacgggttcacaaccgcgtttaccggcttctttaggaacagggaaaatatgttctccgaggaggccaagtccaccagcatcgccttcaggtgtatcaacgagaacctcacccgctacatttccaatatggacattttcgagaaggtggatgcgatcttcgataagcacgaggtgcaggagatcaaagagaagattctcaattccgattatgacgtcgaggatttcttcgaaggggagttctttaattttgtgctcacacaagagggcattgacgtgtacaacgcgattatcgggggcttcgtcacagagtccggggagaagattaaggggctgaatgagtacatcaatctgtacaatcagaagaccaagcagaaactgccgaaattcaagccgctctacaagcaagtcctgtccgatagggaaagcctctccttctacggcgagggctataccagcgacgaggaggtgctggaagtcttccgcaacacactgaataagaatagcgagattttctcctccatcaagaagctcgagaagctctttaagaactttgacgagtacagctccgccgggattttcgtgaagaacgggccggcgatcagcaccatctccaaggacatctttggcgagtggaacgtcatcagggacaagtggaacgccgagtacgacgacatccacctgaagaagaaggcggtggtgaccgagaagtatgaggacgatcgcaggaagtccttcaaaaaaatcggctccttcagcctcgaacagctccaggagtatgccgatgcggatctgtccgtcgtcgagaagctgaaggaaatcatcattcagaaggtcgacgagatctataaagtgtacgggtccagcgagaagctgttcgacgccgactttgtgctcgagggatctaagaagagaagaattaaacaagattgatagaagggctctctgtcatgatttcatactttcattattgagctctgtaattacaattatgaccatgagaacatctcttattgtgtggccttttaattgctgatgttagtactgaaccaaagcttatcgtgatgatgtaaaagcaataagtacttgtttgtagcttctttgtgtctccctttgggcttaatacatctgtttagtgttgtggctttggcatagacttctcttggtaataatgccttgcaatgcaaaatttcaattatcaaattctattatgttctcaccttatggtaacagcttaccctgtggaagatgagattcttgagttgagtcattgccaatttttggcattagcttttgaattagtgaattttgacaaaaattaccgtgacactgattttgttgaagctcttaagtgtagtttttacaaaatttcagtggctcgttgtgattatgtcaaactcacggcgaatgtagttcttacagaatttcagtggctcaaggatttaacgcgtgtatgcggccgcaaactatttaaatgcaggcgataaaaatgttttaaacgatatatattataaaaaaaaacgtttcaaaaataaatacaaaaatgtttttaaatatatataatttaactcattaaagaaaataaaaatgcaagtgcggtgacaagacaagctaaaagttgcaaaagaaatggcagggctataaggctcacctactcctggatttaccaaattttggttcgtccctatactcgaaaaataaaacaaaataaatttcagtatcttcgtttttgtatgctttgactgtgaggcgaggccaactttcttcttctgtctgagatgaattttgtttgcctcctgtgaaggatgtatcattcaaagtgaatgttttgcaactgccagtagtcccacatcgaccaaatattcttattacagtgtgtttatatagcacctggagaaggaatgggttgtttcaaagattaaataatttctactaagtgtagatcaagggactcaacatcaaaggattaatttctactaagtgtagatcaagggactcaacatcaaaggattaatttctactaagtgtagatcaagggactcaacatcaaaggattaatttctactaagtgtagatttttttttgcggccgcaacagagaaactagacctgcaggaaggcgccggcgctctcttaaggtagc

SEQ ID NO: 754 - DNA, 15555 bp, synthetic construct
  source 1..15555: mol_type = other DNA
aaggatccctgaaagcgacgttggatgttaacatctacaaattgccttttcttatcgaccatgtacgtaagcgcttacgtttttggtggacccttgaggaaactggtagctgttgtgggcctgtggactcaagatggatcattaatttccaccttcacctacgatggggggcatcgcaccggtgagtaatattgtacggctaagagcgaatttggcctgtagacctcaattgcgagctttctaatttcaaactattcgggcctaacttttggtgtgatgatgctgactggcaggatatataccgttgtaatttgagctcgtgtgaataagtcgctgtgtatgtttgtttgattgtttctgttggagtgcagcccatttcaccggacaagtcggctagattgatttagccctgatgaactgccgaggggaagccatcttgagcgcggaatgggaatggatttcgttgtacaacgacacgacagaacacccacgggaccgagcttcgaagctttaacgcttgagttaagccgcgccgcgaagcggcgtcggcttgaacgaattgttagacatcagaagaactcgtcaagaaggcgatagaaggcgatgcgctgcgaatcgggagcggcgataccgtaaagcacgaggaagcggtcagcccattcgccgccaagctcttcagcaatatcacgggtagccaacgctatgtcctgatagcggtccgccacacccagccggccacagtcgatgaatccagaaaagcggccattttccaccatgatattcggcaagcaggcatcgccatgggtcacgacgagatcctcgccgtcgggcatgcgcgccttgagcctggcgaacagttcggctggcgcgagcccctgatgctcttcgtccagatcatcctgatcgacaagaccggcttccatccgagtacgtgctcgctcgatgcgatgtttcgcttggtggtcgaatgggcaggtagccggatcaagcgtatgcagccgccgcattgcatcagccatgatggatactttctcggcaggagcaaggtgagatgacaggagatcctgccccggcacttcgcccaatagcagccagtcccttcccgcttcagtgacaacgtcgagcacagctgcgcaaggaacgcccgtcgtggccagccacgatagccgcgctgcctcgtcctgcagttcattcagggcaccggacaggtcggtcttgacaaaaagaaccgggcgcccctgcgctgacagccggaacacggcggcatcagagcagccgattgtctgttgtgcccagtcatagccgaatagcctctccacccaagcggccggagaacctgcgtgcaatccatcttgttcaatcatggctttgtttctccttcaatcattgactattgtcacgttattctgaatcgacgagaactcacatcaatctcaacaagcatctctgctcgcgaaattggtgttgtctcattaaaacgtgaccgtcaaagtctattcactaggacccaaatctctccaggtcccgcaagctagcttcgccgcccacgtttctctttcttctcatattcaattgtcaaaaaacagacctcatgaccaaaatcccttaacgtgagttttcgttccactgagcgtcagaccccgtagaaaagatcaaaggatcttcttgagatcctttttttctgcgcgtaatctgctgcttgcaaacaaaaaaaccaccgctaccagcggtggtttgtttgccggatcaagagctaccaactttttttccgaaggtaactggcttcagcagagcgcagataccaaatactgtccttctagtgtagccgtagttaggccaccacttcaagaactctgtagcaccgcctacatacctcgctctgctaatcctgttaccagtggctgctgccagtggcgataagtcgtgtcttaccgggttggactcaagacgatagttaccggataaggcgcagcggtcgggctgaacggggggttcgtgcacacagcccagcttggagcgaacgacctacaccgaactgagatacctacagcgtgagctatgagaaagcgccacgcttcccgaagggagaaaggcggacaggtatccggtaagcggcagggtcggaacaggagagcgcacgagggagcttccagggggaaacgcctggtatctttatagtcctgtcgggtttcgccacctctgacttgagcgtcgatttttgtgatgctcgtcaggggggcggagcctatggaaaaacgccagcaacgcggcctttttacggttcctggccttttgctggccttttgctcacatgttctttcctgcgttatcccctgattctgtggataaccgtattaccgcctttgagtgagctgataccgctcgccgcagccgaacgaccgagcgcagcgagtcagtgagcgaggaagcggaagagcgcctgatgcggtattttctccttacgcatctgtgcggtatttcacaccgcatatggtgcactctcagtacaatctgctctgatgccgcatagttaagccagtatacaggctctccttcacgatcaacgatcggcatggggccttcgtgcttgttgagtaatgttatcgctcccatcagagcacgcttggtactccgggaatcggatggtctgtcgatcatccaaaaaacgctcatgttttcaacctattaggtctgtggtcagctgaccacagaccatcctgctccatactcgctaattctagccaaaccgcaacgtcccctgcccgctagccttcaagagcgccattatcatcgggccaagtgaaaacttcccgagctcgctccgccgtgtcagatctcggagatagcccccgggcgaattgatgaagttcgctcgctccaaaatgcacgccatcgctgctgccgcattctccggtcccattgcctcacacgcgtcttggtaagccgacgggctgacccccagcatagaccgaaccaccaccgcagccgacatgaggtcacgccagctagcaaccgcaccgctcggcccataattgccaatggtcgggcatgctttcaggatcatcccgagggggaacgcttttatcggctcgctccttgcccggtctatttcactcggcttagcgccctgctccttttcagagcgaggttcaagttcattaacggattcgggttttgaattctgtatgtgctgctcgctctgggcagcattggtgctattattttctgaattgtctctaatttccaaccggttgattatctcttcctggagcatccacatctcttcgagaattgactctacatcagcaagcgtcggggcgcgtggaattctacccacaagttccacatagacttcctcgacagcttgccagtcgccctccgctccctcttccatagctgccgtaattagcttccgaacgtcccgtcggcaaatcgtcagactttctttggccatcctgaatgctgctcgatcggccatcacttgctgtgccatcatcgctagctcttcggaccgcgcgagaagcggagacaaatcgaagccaaacgcgcgctcgatctgaccagcgccatccttacgagcgtaacgctttccgttggcgctatccttccggacgatcaagcctgactccacgagcatggcgatgtgcctacgcaaagtcgcgccagccatcccatgcgcccgaagggcaagctgagcattcgacgggaagacgatcagctgtgcctcctgacgcaactccgtttccgggtgaaagctcaatagcgcatcaaggacggcaagactgttggactggattccaagtagttccatggccgcggacgcatctctaaagaccttccacttgtccgctgtcttgccttgtttgatatcggccagcgccgtctggcgccgcacaagcgcaagcgtcattggccgccgcccgaatggcgtcgttacacttcctgtctgcatcatctttcacctttcagcaggcaaaggaaatcagctcaccaaaacggcgctaaaaactcttgacgaggattcgaggaaatgcgattctgttcgcgctagagagacagaagggcttccgcgacggcgacgttgagggggctcttttcttttgcggtttactctccccgtttccgttggttctcagcgtggtacgcttgatacagcgctggcacatgatcgagcacgaaggtcgcaaaatcgggcgtcgccttcctgtcaatcgtgatttccagtttggccttgctctgcgtcacctgtgcaattctggtgccgtctggggtggccatgacctcgggaagtccacgcgcaacccgactgggcttcagactagcgatcaccgccttgaatcgttctgccgatggcagcgcttgaacttcctccgacatagcatatttagccacgtcggccggtgaagaaactttctcaatcagctcggcaagttgttgccaactcggccgtccaacaccaggagcggcaccaatagcatcggtcagttcagaggggagggcgtcgacgagcagaagcatcttggacaaattgctcttgtcgatcgacatcgcggcgatgacaatctctcgagaaaactgcctgttcaggcgatgtgcgaagcgcgccttttcgatgaaggtaagatcttcgcgctcattgttttcctgaccctgtgctacgaccacttgctcgtccgtcagttcgcgaacgaccgctctgaccggaagtccgagttctgaaacggcgcgtagccggcggtggccgaaggcaacctgatatcggcccggctggctcggatgcggtcgcacaaggattgggacttgctgtccttgttcccggatcgaagtaaggagcccgtcaatgtcccctcgcatacgatcctgcacgaaagacggttctattgacgaggcatccaactctatcactgcctgaccttcagcgaggcgccgctcgatctcttcggcacggctaagacgatcgttttgctctcgcagtgcgttaccaatgttcgctgtgagcttcgttgccggatcgcgctccttccttgttacgccgaggagcggcatggagcggttctttgccgtcctattgtcggcgggcgacgtttcaggggcgtcagttgacacgccaaggatgtgcttccggctcatgtgggcctaccccatgcttttttgatcagtgtttcgatctcgtcgttgacggcgttcatcgcctccaaggctcgatcataggtcgagcgcgtgaacaggccacgctccacttcgaatagagtctggtttgtcaggccagcgtccgaaaccgcggtggttttaagcatcggaaaattgaggacattttcgccaaaaatcgaccgcagataacctaccatttggttctgtggtccgtcgctcggttcgaaacgggttatcagatagcgcatccaattaaacttgaacttggcgccagcattctcgatttcacgcaaaaggttcgatgtcattgccagaaactggttcatcgacatcacatccagcatctgcggatggaccgtgacaagaatggacgtcgccgcagtcaatgcggatagcgtgagatacccaagctggggagggcagtcgatgaccacgacgtcatagttatccgcgatatcttcaattacttggctgatgcgaccataaaagagcgtgtcgccctctttgcggttcatcagcgcgcgtggcgtatcgtgttcaaactccatcagctcaaggttaccaggaatcaggtggaggtcgggaatgtaagtccctcggacgactcgttcgattgccacttgctcatcatcataccttatagcgccgtagagcgtttcgttcgggccaacgtccgtttccggttggctcccaaagagtgcagaaaggctcgcttgaggatcgagatcaatggccaagactcgatatccgcgcatagcgaggtactgcgccagatgcgcggcggtggtggtcttacccgacccacctttgaaattcatcacagagataacctgaagctgctcgccgcctcgacgatgtggcaggtagcgccggttcccgcggccgacctgatccatatacttccgaatcacatggatatcttcaattgagaacattcgcctgccacccgggctcatgctaacattcaactctggcatctcagacgcggtctgccgtaaatatgactcgccaacgccgagcagcttggacgcctccgatggcccgaatgttcgaatgcccttctcggaatgcggcgggaaaaccttaagatgatgtgcttgaagttggctcgagagggcatcggcatgacgctccatcaaggccgtcaaccctacaactacaggcgctgcttttaggacagacttcgccatctcaaacccattccttgccagtggcgatatttttcgcgaaactggaaaagttccgccgctggcaattagcgccgattctgctgtttgggcaagagcttttaggttaacagaaggttaacgccctcaggtcgaaaaactccacccaactgttatttgtatttatttccaatgccttagagagattgccatttgaatatgttcatgtattgttttagtgataatcctacaatcgtaacccaaaaagaggtcgccctctgcgcgccgtcgtccaatataggcgaagtcacccttgcgactcaggcggattctaccttgtacacgtgtcgagtggaaaagtcccatgtggatcactccgttgccccgtcgctcaccgtgttggggggaaggtgcacatggctcagttctcaatggaaattatctgcctaaccggctcagttctgcgtagaaaccaacatgcaagctccaccgggtgcaaagcggcagcggcggcaggatatattcaattgtaaatggcttcatgtccgggaaatctacatggatcagcaatgagtatgatggtcaatatggagaaaaagaaagagtaattaccaattttttttcaattcaaaaatgtagatgtccgcagcgttattataaaatgaaagtacattttgataaaacgacaaattacgatccgtcgtatttataggcgaaagcaataaacaaattattctaattcggaaatctttatttcgacgtgtctacattcacgtccaaatgggggcttagatgagaaacttcacgatcgatgcggccctgccggcgcgccactagtcaacaattggccaatctttgttctaaattgctaataaacgaccatttccgtcaattctccttggttgcaacagtctacccgtcaaatgtttactaatttataagtgtgaagtttgaattatgaaagacgaaatcgtattaaaaattcacaagaataaacaactccatagattttcaaaaaaacagtcacgagaaaaaaaccacagtccgtttgtctgctcttctagtttttattatttttctattaatagttttttgttatttcgagaataaaatttgaacgatgtccgaaccacaaaagccgagccgataaatcctaagccgagcctaactttagccgtaaccatcagtcacggctcccgggctaattcatttgaaccgaatcataatcaacggtttagatcaaactcaaaacaatctaacggcaacatagacgcgtcggtgagctaaaaagagtgtgaaagccaggtcaccatagcattgtctctcccagattttttatttgggaaataatagaagaaatagaaaaaaataaaagagtgagaaaaatcgtagagctatatattcgcacatgtactcgtttcgctttccttagtgttagctgctgccgctgttgtttctcctccatttctctatctttctctctcgctgcttctcgaatcttctgtatcatcttcttcttcttcaaggtgagtctctagatccgttcgcttgattttgctgctcgttagtcgttattgttgattctctatgccgatttcgctagatctgtttagcatgcgttgtggttttatgagaaaatctttgttttgggggttgcttgttatgtgattcgatccgtgcttgttggatcgatctgagctaattcttaaggtttatgtgttagatctatggagtttgaggattcttctcgcttctgtcgatctctcgctgttatttttgtttttttcagtgaagtgaagttgtttagttcgaaatgacttcgtgtatgctcgattgatctggttttaatcttcgatctgttaggtgttgatgtttacaagtgaattctagtgttttctcgttgagatctgtgaagtttgaacctagttttctcaataatcaacatatgaagcgatgtttgagtttcaataaacgctgctaatcttcgaaactaagttgtgatctgattcgtgtttacttcatgagcttatccaattcatttcggtttcattttactttttttttagtgaaccatggcgcaagttagcagaatctgcaatggtgtgcagaacccatctcttatctccaatctctcgaaatccagtcaacgcaaatctcccttatcggtttctctgaagacgcagcagcatccacgagcttatccgatttcgtcgtcgtggggattgaagaagagtgggatgacgttaattggctctgagcttcgtcctcttaaggtcatgtcttctgtttccacggcgtgcatgggggaagcggtgatcgccgaagtatcgactcaactatcagaggtagttggcgtcatcgagcgccatctcgaaccgacgttgctggccgtacatttgtacggctccgcagtggatggcggcctgaagccacacagtgatattgatttgctggttacggtgaccgtaaggcttgatgaaacaacgcggcgagctttgatcaacgaccttttggaaacttcggcttcccctggagagagcgagattctccgcgctgtagaagtcaccattgttgtgcacgacgacatcattccgtggcgttatccagctaagcgcgaactgcaatttggagaatggcagcgcaatgacattcttgcaggtatcttcgagccagccacgatcgacattgatctggctatcttgctgacaaaagcaagagaacatagcgttgccttggtaggtccagcggcggaggaactctttgatccggttcctgaacaggatctatttgaggcgctaaatgaaaccttaacgctatggaactcgccgcccgactgggctggcgatgagcgaaatgtagtgcttacgttgtcccgcatttggtacagcgcagtaaccggcaaaatcgcgccgaaggatgtcgctgccgactgggcaatggagcgcctgccggcccagtatcagcccgtcatacttgaagctagacaggcttatcttggacaagaagaagatcgcttggcctcgcgcgcagatcagttggaagaatttgtccactacgtgaaaggcgagatcaccaaggtagtcggcaaataaggatcaattcccgatcgttcaaacatttggcaataaagtttcttaagattgaatcctgttgccggtcttgcgatgattatcatataatttctgttgaattacgttaagcatgtaataattaacatgtaatgcatgacgttatttatgagatgggtttttatgattagagtcccgcaattatacatttaatacgcgatagaaaacaaaatatagcgcgcaaactaggataaattatcgcgcgcggtgtcatctatgttactagatcacgcgtgtatgcaatatcctgcagggtattaattaattatgccctaagacatcctggaccaatatgctgaagattatgctacctacaccaggataggacttgaagcacttaaccttgaagattggttcgaagaaccagaacccgatccacctaaccctgtggaccgccagaggatagaggacatcctggacctactgaacgtcagcaatgacgactgaaagattcccaggacaccggcggaagtggtggacccagtctaggtgcgatgcttagtcgcgcacgatgactatgtcggaaggcatctttgctttcggcaaactttagtaatactttaaggaaagtattgtacaagttaggtgcagagacaataatgcacccagctttagctttgtttatggaattattgtgtcggttgcattattggatgcctgcgtgcaccctaagcaatcaacggagaaacaaagataaaaatcaattactcacatgaaagagtattgatcacgagtcactatggagcgacaatctccagacaggatgtcagcatcttatcttcctttgaagaaagcatcatcaataacgatgtaatggtggggacatccactaagttattgctctgcaaacagctcaaaaagctactggccgacaatcataattgctcggcatgtccaggtggggcctccactagcaataatacaagctttacagcttgcagtgactcatcctccaataatggagaaaaagacgtcagcagtgacgaacaagggtcgaaagacttgcctatataagggcattctcccctcagttgaagatcatcgaaagttggagcaataaactctctcttcaacaaatctatcttttatcttttatcgccgcaatggcgggatctaagaagagaagaattaaacaagattccgacaaagcgttttactccagcttcatggccctcatgtccctgatgctccaaatgaggaatagcatcacagggcgcaccgacgtcgacttcctcatcagcccggtgaagaactccgacgggatcttttacgactcccgcaactatgaggcgcaagagaatgcgatcctcccgaagaacgccgatgcgaacggggcctataatatcgccaggaaagtgctctgggccatcgggcagttcaaaaaggcggaggatgagaagctcgacaaggtgaaaattgccatttccaacaaggagtggctggagtacgcgcagacctccgtgaagcacggctcctctggcagctccggctctagcggctcctctggcagctccggctccaagctggagaagtttacaaactgttacagcctctccaaaaccctcaggtttaaagcgatcccggtgggcaagacccaggagaacatcgacaacaagaggctcctggtggaagacgagaagcgcgccgaagactacaagggcgtgaagaagctgctcgataggtactacctcagctttattaacgacgtgctgcacagcatcaaactcaagaatctcaacaactacatctccctcttccgcaaaaagacccgcaccgagaaggagaacaaggagctggagaacctggagatcaacctccgcaaggaaatcgccaaagcgttcaagggcaatgaagggtacaagagcctcttcaagaaagacatcatcgaaactatcctcccagagtttctcgatgacaaggacgagatcgcgctggtgaactcctttaacgggttcacaaccgcgtttaccggcttctttaggaacagggaaaatatgttctccgaggaggccaagtccaccagcatcgccttcaggtgtatcaacgagaacctcacccgctacatttccaatatggacattttcgagaaggtggatgcgatcttcgataagcacgaggtgcaggagatcaaagagaagattctcaattccgattatgacgtcgaggatttcttcgaaggggagttctttaattttgtgctcacacaagagggcattgacgtgtacaacgcgattatcgggggcttcgtcacagagtccggggagaagattaaggggctgaatgagtacatcaatctgtacaatcagaagaccaagcagaaactgccgaaattcaagccgctctacaagcaagtcctgtccgatagggaaagcctctccttctacggcgagggctataccagcgacgaggaggtgctggaagtcttccgcaacacactgaataagaatagcgagattttctcctccatcaagaagctcgagaagctctttaagaactttgacgagtacagctccgccgggattttcgtgaagaacgggccggcgatcagcaccatctccaaggacatctttggcgagtggaacgtcatcagggacaagtggaacgccgagtacgacgacatccacctgaagaagaaggcggtggtgaccgagaagtatgaggacgatcgcaggaagtccttcaaaaaaatcggctccttcagcctcgaacagctccaggagtatgccgatgcggatctgtccgtcgtcgagaagctgaaggaaatcatcattcagaaggtcgacgagatctataaagtgtacgggtccagcgagaagctgttcgacgccgactttgtgctcgagaagtccctcaaaaagaatgacgccgtggtggccattatgaaagacctgctcgactccgtgaagtccttcgaaaattacattaaagcgttctttggggaggggaaggaaactaacagggatgagtccttctatggcgactttgtcctcgcgtacgacatcctgctgaaggtcgaccacatttacgacgcgatccgcaactacgtgacacagaagccgtactccaaagacaagttcaagctgtacttccagaacccgcaatttatggggggctgggacaaggataaagagacagactaccgcgcgacaattctccgctatggctccaaatactatctggccatcatggacaagaagtacgcgaagtgcctgcagaagatcgacaaagacgacgtcaatggcaactatgaaaagatcaactacaagctgctgccgggcccgaacaagatgctcccgaaggtgttcttcagcaagaagtggatggcctactacaatccaagcgaggatattcagaaaatctataaaaacgggaccttcaagaagggggacatgtttaacctcaacgactgccacaagctcattgatttcttcaaggatagcatttcccgctacccgaaatggtccaatgcgtacgattttaacttctccgagacagaaaagtacaaagacatcgcgggcttttacagggaggtggaggagcaagggtataaagtttcttttgaatccgcgagcaagaaggaagtcgacaagctcgtcgaggagggcaagctctacatgttccaaatttataacaaggacttttccgacaagagccatgggaccccaaacctccacaccatgtacttcaaactgctctttgacgagaacaaccacgggcaaatcaggctgagcggcggcgccgaattattcatgcgcagggcctccctcaagaaggaagagctggtcgtccatccagccaattccccgatcgcgaacaagaacccggacaatccgaaaaagaccaccaccctgtcctacgacgtctacaaggacaaacgcttcagcgaagaccagtacgaattacacatcccaattgcgattaataagtgcccaaagaatatcttcaaaattaatacagaggtcagggtgctgctcaaacacgacgacaatccgtatgtcatcggcattgacaggggcgagcgcaatctgctctatatcgtggtcgtggatgggaagggcaatattgtggagcagtactccctgaacgagattatcaacaacttcaatgggattaggattaagaccgactatcacagcctgctcgacaagaaagaaaaagagaggtttgaggcccgccaaaactggacctccattgagaatatcaaagaattaaaggccggctatatttcccaagtcgtccacaagatctgcgagctggtggagaaatatgacgccgtgattgcgctcgaagacttaaattctgggttcaagaactcccgcgtgaaggtggaaaaacaggtgtatcagaaattcgagaaaatgctgatcgacaaactcaattatatggtggataagaagtccaacccgtgtgccacagggggcgcgctgaagggctatcagatcaccaacaagttcgagagcttcaagagcatgagcacccagaacgggtttattttctacatcccggcgtggctcacctccaagattgacccgagcaccggcttcgtgaacctcctgaagacaaagtatacctccattgccgacagcaagaagtttatctcctccttcgaccgcattatgtatgtgccggaggaggacctcttcgagttcgccctcgactacaaaaacttcagccgcacagatgcggattacatcaagaagtggaagctgtactcctacgggaacaggatccgcatcttcaggaatccaaaaaaaaataacgtctttgactgggaggaagtgtgcctgacatccgcctacaaggaactgttcaataaatacggcatcaattaccagcagggcgacattcgcgccctcctctgtgagcagggatctaagaagagaagaattaaacaagattgatagaagggctctctgtcatgatttcatactttcattattgagctctgtaattacaattatgaccatgagaacatctcttattgtgtggccttttaattgctgatgttagtactgaaccaaagcttatcgtgatgatgtaaaagcaataagtacttgtttgtagcttctttgtgtctccctttgggcttaatacatctgtttagtgttgtggctttggcatagacttctcttggtaataatgccttgcaatgcaaaatttcaattatcaaattctattatgttctcaccttatggtaacagcttaccctgtggaagatgagattcttgagttgagtcattgccaatttttggcattagcttttgaattagtgaattttgacaaaaattaccgtgacactgattttgttgaagctcttaagtgtagtttttacaaaatttcagtggctcgttgtgattatgtcaaactcacggcgaatgtagttcttacagaatttcagtggctcaaggatttaacgcgtgtatgcggccgcaaactatttaaatgcaggcgataaaaatgttttaaacgatatatattataaaaaaaaacgtttcaaaaataaatacaaaaatgtttttaaatatatataatttaactcattaaagaaaataaaaatgcaagtgcggtgacaagacaagctaaaagttgcaaaagaaatggcagggctataaggctcacctactcctggatttaccaaattttggttcgtccctatactcgaaaaataaaacaaaataaatttcagtatcttcgtttttgtatgctttgactgtgaggcgaggccaactttcttcttctgtctgagatgaattttgtttgcctcctgtgaaggatgtatcattcaaagtgaatgttttgcaactgccagtagtcccacatcgaccaaatattcttattacagtgtgtttatatagcacctggagaaggaatgggttgtttcaaagattaaataatttctactaagtgtagatcaagggactcaacatcaaaggattaatttctactaagtgtagatcaagggactcaacatcaaaggattaatttctactaagtgtagatcaagggactcaacatcaaaggattaatttctactaagtgtagatttttttttgcggccgcaacagagaaactagacctgcaggaaggcgccggcgctctcttaaggtagc

SEQ ID NO: 755 - DNA, 15509 bp, synthetic construct
  source 1..15509: mol_type = other DNA
aaggatccctgaaagcgacgttggatgttaacatctacaaattgccttttcttatcgaccatgtacgtaagcgcttacgtttttggtggacccttgaggaaactggtagctgttgtgggcctgtggactcaagatggatcattaatttccaccttcacctacgatggggggcatcgcaccggtgagtaatattgtacggctaagagcgaatttggcctgtagacctcaattgcgagctttctaatttcaaactattcgggcctaacttttggtgtgatgatgctgactggcaggatatataccgttgtaatttgagctcgtgtgaataagtcgctgtgtatgtttgtttgattgtttctgttggagtgcagcccatttcaccggacaagtcggctagattgatttagccctgatgaactgccgaggggaagccatcttgagcgcggaatgggaatggatttcgttgtacaacgacacgacagaacacccacgggaccgagcttcgaagctttaacgcttgagttaagccgcgccgcgaagcggcgtcggcttgaacgaattgttagacatcagaagaactcgtcaagaaggcgatagaaggcgatgcgctgcgaatcgggagcggcgataccgtaaagcacgaggaagcggtcagcccattcgccgccaagctcttcagcaatatcacgggtagccaacgctatgtcctgatagcggtccgccacacccagccggccacagtcgatgaatccagaaaagcggccattttccaccatgatattcggcaagcaggcatcgccatgggtcacgacgagatcctcgccgtcgggcatgcgcgccttgagcctggcgaacagttcggctggcgcgagcccctgatgctcttcgtccagatcatcctgatcgacaagaccggcttccatccgagtacgtgctcgctcgatgcgatgtttcgcttggtggtcgaatgggcaggtagccggatcaagcgtatgcagccgccgcattgcatcagccatgatggatactttctcggcaggagcaaggtgagatgacaggagatcctgccccggcacttcgcccaatagcagccagtcccttcccgcttcagtgacaacgtcgagcacagctgcgcaaggaacgcccgtcgtggccagccacgatagccgcgctgcctcgtcctgcagttcattcagggcaccggacaggtcggtcttgacaaaaagaaccgggcgcccctgcgctgacagccggaacacggcggcatcagagcagccgattgtctgttgtgcccagtcatagccgaatagcctctccacccaagcggccggagaacctgcgtgcaatccatcttgttcaatcatggctttgtttctccttcaatcattgactattgtcacgttattctgaatcgacgagaactcacatcaatctcaacaagcatctctgctcgcgaaattggtgttgtctcattaaaacgtgaccgtcaaagtctattcactaggacccaaatctctccaggtcccgcaagctagcttcgccgcccacgtttctctttcttctcatattcaattgtcaaaaaacagacctcatgaccaaaatcccttaacgtgagttttcgttccactgagcgtcagaccccgtagaaaagatcaaaggatcttcttgagatcctttttttctgcgcgtaatctgctgcttgcaaacaaaaaaaccaccgctaccagcggtggtttgtttgccggatcaagagctaccaactttttttccgaaggtaactggcttcagcagagcgcagataccaaatactgtccttctagtgtagccgtagttaggccaccacttcaagaactctgtagcaccgcctacatacctcgctctgctaatcctgttaccagtggctgctgccagtggcgataagtcgtgtcttaccgggttggactcaagacgatagttaccggataaggcgcagcggtcgggctgaacggggggttcgtgcacacagcccagcttggagcgaacgacctacaccgaactgagatacctacagcgtgagctatgagaaagcgccacgcttcccgaagggagaaaggcggacaggtatccggtaagcggcagggtcggaacaggagagcgcacgagggagcttccagggggaaacgcctggtatctttatagtcctgtcgggtttcgccacctctgacttgagcgtcgatttttgtgatgctcgtcaggggggcggagcctatggaaaaacgccagcaacgcggcctttttacggttcctggccttttgctggccttttgctcacatgttctttcctgcgttatcccctgattctgtggataaccgtattaccgcctttgagtgagctgataccgctcgccgcagccgaacgaccgagcgcagcgagtcagtgagcgaggaagcggaagagcgcctgatgcggtattttctccttacgcatctgtgcggtatttcacaccgcatatggtgcactctcagtacaatctgctctgatgccgcatagttaagccagtatacaggctctccttcacgatcaacgatcggcatggggccttcgtgcttgttgagtaatgttatcgctcccatcagagcacgcttggtactccgggaatcggatggtctgtcgatcatccaaaaaacgctcatgttttcaacctattaggtctgtggtcagctgaccacagaccatcctgctccatactcgctaattctagccaaaccgcaacgtcccctgcccgctagccttcaagagcgccattatcatcgggccaagtgaaaacttcccgagctcgctccgccgtgtcagatctcggagatagcccccgggcgaattgatgaagttcgctcgctccaaaatgcacgccatcgctgctgccgcattctccggtcccattgcctcacacgcgtcttggtaagccgacgggctgacccccagcatagaccgaaccaccaccgcagccgacatgaggtcacgccagctagcaaccgcaccgctcggcccataattgccaatggtcgggcatgctttcaggatcatcccgagggggaacgcttttatcggctcgctccttgcccggtctatttcactcggcttagcgccctgctccttttcagagcgaggttcaagttcattaacggattcgggttttgaattctgtatgtgctgctcgctctgggcagcattggtgctattattttctgaattgtctctaatttccaaccggttgattatctcttcctggagcatccacatctcttcgagaattgactctacatcagcaagcgtcggggcgcgtggaattctacccacaagttccacatagacttcctcgacagcttgccagtcgccctccgctccctcttccatagctgccgtaattagcttccgaacgtcccgtcggcaaatcgtcagactttctttggccatcctgaatgctgctcgatcggccatcacttgctgtgccatcatcgctagctcttcggaccgcgcgagaagcggagacaaatcgaagccaaacgcgcgctcgatctgaccagcgccatccttacgagcgtaacgctttccgttggcgctatccttccggacgatcaagcctgactccacgagcatggcgatgtgcctacgcaaagtcgcgccagccatcccatgcgcccgaagggcaagctgagcattcgacgggaagacgatcagctgtgcctcctgacgcaactccgtttccgggtgaaagctcaatagcgcatcaaggacggcaagactgttggactggattccaagtagttccatggccgcggacgcatctctaaagaccttccacttgtccgctgtcttgccttgtttgatatcggccagcgccgtctggcgccgcacaagcgcaagcgtcattggccgccgcccgaatggcgtcgttacacttcctgtctgcatcatctttcacctttcagcaggcaaaggaaatcagctcaccaaaacggcgctaaaaactcttgacgaggattcgaggaaatgcgattctgttcgcgctagagagacagaagggcttccgcgacggcgacgttgagggggctcttttcttttgcggtttactctccccgtttccgttggttctcagcgtggtacgcttgatacagcgctggcacatgatcgagcacgaaggtcgcaaaatcgggcgtcgccttcctgtcaatcgtgatttccagtttggccttgctctgcgtcacctgtgcaattctggtgccgtctggggtggccatgacctcgggaagtccacgcgcaacccgactgggcttcagactagcgatcaccgccttgaatcgttctgccgatggcagcgcttgaacttcctccgacatagcatatttagccacgtcggccggtgaagaaactttctcaatcagctcggcaagttgttgccaactcggccgtccaacaccaggagcggcaccaatagcatcggtcagttcagaggggagggcgtcgacgagcagaagcatcttggacaaattgctcttgtcgatcgacatcgcggcgatgacaatctctcgagaaaactgcctgttcaggcgatgtgcgaagcgcgccttttcgatgaaggtaagatcttcgcgctcattgttttcctgaccctgtgctacgaccacttgctcgtccgtcagttcgcgaacgaccgctctgaccggaagtccgagttctgaaacggcgcgtagccggcggtggccgaaggcaacctgatatcggcccggctggctcggatgcggtcgcacaaggattgggacttgctgtccttgttcccggatcgaagtaaggagcccgtcaatgtcccctcgcatacgatcctgcacgaaagacggttctattgacgaggcatccaactctatcactgcctgaccttcagcgaggcgccgctcgatctcttcggcacggctaagacgatcgttttgctctcgcagtgcgttaccaatgttcgctgtgagcttcgttgccggatcgcgctccttccttgttacgccgaggagcggcatggagcggttctttgccgtcctattgtcggcgggcgacgtttcaggggcgtcagttgacacgccaaggatgtgcttccggctcatgtgggcctaccccatgcttttttgatcagtgtttcgatctcgtcgttgacggcgttcatcgcctccaaggctcgatcataggtcgagcgcgtgaacaggccacgctccacttcgaatagagtctggtttgtcaggccagcgtccgaaaccgcggtggttttaagcatcggaaaattgaggacattttcgccaaaaatcgaccgcagataacctaccatttggttctgtggtccgtcgctcggttcgaaacgggttatcagatagcgcatccaattaaacttgaacttggcgccagcattctcgatttcacgcaaaaggttcgatgtcattgccagaaactggttcatcgacatcacatccagcatctgcggatggaccgtgacaagaatggacgtcgccgcagtcaatgcggatagcgtgagatacccaagctggggagggcagtcgatgaccacgacgtcatagttatccgcgatatcttcaattacttggctgatgcgaccataaaagagcgtgtcgccctctttgcggttcatcagcgcgcgtggcgtatcgtgttcaaactccatcagctcaaggttaccaggaatcaggtggaggtcgggaatgtaagtccctcggacgactcgttcgattgccacttgctcatcatcataccttatagcgccgtagagcgtttcgttcgggccaacgtccgtttccggttggctcccaaagagtgcagaaaggctcgcttgaggatcgagatcaatggccaagactcgatatccgcgcatagcgaggtactgcgccagatgcgcggcggtggtggtcttacccgacccacctttgaaattcatcacagagataacctgaagctgctcgccgcctcgacgatgtggcaggtagcgccggttcccgcggccgacctgatccatatacttccgaatcacatggatatcttcaattgagaacattcgcctgccacccgggctcatgctaacattcaactctggcatctcagacgcggtctgccgtaaatatgactcgccaacgccgagcagcttggacgcctccgatggcccgaatgttcgaatgcccttctcggaatgcggcgggaaaaccttaagatgatgtgcttgaagttggctcgagagggcatcggcatgacgctccatcaaggccgtcaaccctacaactacaggcgctgcttttaggacagacttcgccatctcaaacccattccttgccagtggcgatatttttcgcgaaactggaaaagttccgccgctggcaattagcgccgattctgctgtttgggcaagagcttttaggttaacagaaggttaacgccctcaggtcgaaaaactccacccaactgttatttgtatttatttccaatgccttagagagattgccatttgaatatgttcatgtattgttttagtgataatcctacaatcgtaacccaaaaagaggtcgccctctgcgcgccgtcgtccaatataggcgaagtcacccttgcgactcaggcggattctaccttgtacacgtgtcgagtggaaaagtcccatgtggatcactccgttgccccgtcgctcaccgtgttggggggaaggtgcacatggctcagttctcaatggaaattatctgcctaaccggctcagttctgcgtagaaaccaacatgcaagctccaccgggtgcaaagcggcagcggcggcaggatatattcaattgtaaatggcttcatgtccgggaaatctacatggatcagcaatgagtatgatggtcaatatggagaaaaagaaagagtaattaccaattttttttcaattcaaaaatgtagatgtccgcagcgttattataaaatgaaagtacattttgataaaacgacaaattacgatccgtcgtatttataggcgaaagcaataaacaaattattctaattcggaaatctttatttcgacgtgtctacattcacgtccaaatgggggcttagatgagaaacttcacgatcgatgcggccctgccggcgcgccactagtcaacaattggccaatctttgttctaaattgctaataaacgaccatttccgtcaattctccttggttgcaacagtctacccgtcaaatgtttactaatttataagtgtgaagtttgaattatgaaagacgaaatcgtattaaaaattcacaagaataaacaactccatagattttcaaaaaaacagtcacgagaaaaaaaccacagtccgtttgtctgctcttctagtttttattatttttctattaatagttttttgttatttcgagaataaaatttgaacgatgtccgaaccacaaaagccgagccgataaatcctaagccgagcctaactttagccgtaaccatcagtcacggctcccgggctaattcatttgaaccgaatcataatcaacggtttagatcaaactcaaaacaatctaacggcaacatagacgcgtcggtgagctaaaaagagtgtgaaagccaggtcaccatagcattgtctctcccagattttttatttgggaaataatagaagaaatagaaaaaaataaaagagtgagaaaaatcgtagagctatatattcgcacatgtactcgtttcgctttccttagtgttagctgctgccgctgttgtttctcctccatttctctatctttctctctcgctgcttctcgaatcttctgtatcatcttcttcttcttcaaggtgagtctctagatccgttcgcttgattttgctgctcgttagtcgttattgttgattctctatgccgatttcgctagatctgtttagcatgcgttgtggttttatgagaaaatctttgttttgggggttgcttgttatgtgattcgatccgtgcttgttggatcgatctgagctaattcttaaggtttatgtgttagatctatggagtttgaggattcttctcgcttctgtcgatctctcgctgttatttttgtttttttcagtgaagtgaagttgtttagttcgaaatgacttcgtgtatgctcgattgatctggttttaatcttcgatctgttaggtgttgatgtttacaagtgaattctagtgttttctcgttgagatctgtgaagtttgaacctagttttctcaataatcaacatatgaagcgatgtttgagtttcaataaacgctgctaatcttcgaaactaagttgtgatctgattcgtgtttacttcatgagcttatccaattcatttcggtttcattttactttttttttagtgaaccatggcgcaagttagcagaatctgcaatggtgtgcagaacccatctcttatctccaatctctcgaaatccagtcaacgcaaatctcccttatcggtttctctgaagacgcagcagcatccacgagcttatccgatttcgtcgtcgtggggattgaagaagagtgggatgacgttaattggctctgagcttcgtcctcttaaggtcatgtcttctgtttccacggcgtgcatgggggaagcggtgatcgccgaagtatcgactcaactatcagaggtagttggcgtcatcgagcgccatctcgaaccgacgttgctggccgtacatttgtacggctccgcagtggatggcggcctgaagccacacagtgatattgatttgctggttacggtgaccgtaaggcttgatgaaacaacgcggcgagctttgatcaacgaccttttggaaacttcggcttcccctggagagagcgagattctccgcgctgtagaagtcaccattgttgtgcacgacgacatcattccgtggcgttatccagctaagcgcgaactgcaatttggagaatggcagcgcaatgacattcttgcaggtatcttcgagccagccacgatcgacattgatctggctatcttgctgacaaaagcaagagaacatagcgttgccttggtaggtccagcggcggaggaactctttgatccggttcctgaacaggatctatttgaggcgctaaatgaaaccttaacgctatggaactcgccgcccgactgggctggcgatgagcgaaatgtagtgcttacgttgtcccgcatttggtacagcgcagtaaccggcaaaatcgcgccgaaggatgtcgctgccgactgggcaatggagcgcctgccggcccagtatcagcccgtcatacttgaagctagacaggcttatcttggacaagaagaagatcgcttggcctcgcgcgcagatcagttggaagaatttgtccactacgtgaaaggcgagatcaccaaggtagtcggcaaataaggatcaattcccgatcgttcaaacatttggcaataaagtttcttaagattgaatcctgttgccggtcttgcgatgattatcatataatttctgttgaattacgttaagcatgtaataattaacatgtaatgcatgacgttatttatgagatgggtttttatgattagagtcccgcaattatacatttaatacgcgatagaaaacaaaatatagcgcgcaaactaggataaattatcgcgcgcggtgtcatctatgttactagatcacgcgtgtatgcaatatcctgcagggtattaattaattatgccctaagacatcctggaccaatatgctgaagattatgctacctacaccaggataggacttgaagcacttaaccttgaagattggttcgaagaaccagaacccgatccacctaaccctgtggaccgccagaggatagaggacatcctggacctactgaacgtcagcaatgacgactgaaagattcccaggacaccggcggaagtggtggacccagtctaggtgcgatgcttagtcgcgcacgatgactatgtcggaaggcatctttgctttcggcaaactttagtaatactttaaggaaagtattgtacaagttaggtgcagagacaataatgcacccagctttagctttgtttatggaattattgtgtcggttgcattattggatgcctgcgtgcaccctaagcaatcaacggagaaacaaagataaaaatcaattactcacatgaaagagtattgatcacgagtcactatggagcgacaatctccagacaggatgtcagcatcttatcttcctttgaagaaagcatcatcaataacgatgtaatggtggggacatccactaagttattgctctgcaaacagctcaaaaagctactggccgacaatcataattgctcggcatgtccaggtggggcctccactagcaataatacaagctttacagcttgcagtgactcatcctccaataatggagaaaaagacgtcagcagtgacgaacaagggtcgaaagacttgcctatataagggcattctcccctcagttgaagatcatcgaaagttggagcaataaactctctcttcaacaaatctatcttttatcttttatcgccgcaaatggcgggatctaagaagagaagaattaaacaagattccaagctggagaagtttacaaactgttacagcctctccaaaaccctcaggtttaaagcgatcccggtgggcaagacccaggagaacatcgacaacaagaggctcctggtggaagacgagaagcgcgccgaagactacaagggcgtgaagaagctgctcgataggtactacctcagctttattaacgacgtgctgcacagcatcaaactcaagaatctcaacaactacatctccctcttccgcaaaaagacccgcaccgagaaggagaacaaggagctggagaacctggagatcaacctccgcaaggaaatcgccaaagcgttcaagggcaatgaagggtacaagagcctcttcaagaaagacatcatcgaaactatcctcccagagtttctcgatgacaaggacgagatcgcgctggtgaactcctttaacgggttcacaaccgcgtttaccggcttctttaggaacagggaaaatatgttctccgaggaggccaagtccaccagcatcgccttcaggtgtatcaacgagaacctcacccgctacatttccaatatggacattttcgagaaggtggatgcgatcttcgataagcacgaggtgcaggagatcaaagagaagattctcaattccgattatgacgtcgaggatttcttcgaaggggagttctttaattttgtgctcacacaagagggcattgacgtgtacaacgcgattatcgggggcttcgtcacagagtccggggagaagattaaggggctgaatgagtacatcaatctgtacaatcagaagaccaagcagaaactgccgaaattcaagccgctctacaagcaagtcctgtccgatagggaaagcctctccttctacggcgagggctataccagcgacgaggaggtgctggaagtcttccgcaacacactgaataagaatagcgagattttctcctccatcaagaagctcgagaagctctttaagaactttgacgagtacagctccgccgggattttcgtgaagaacgggccggcgatcagcaccatctccaaggacatctttggcgagtggaacgtcatcagggacaagtggaacgccgagtacgacgacatccacctgaagaagaaggcggtggtgaccgagaagtatgaggacgatcgcaggaagtccttcaaaaaaatcggctccttcagcctcgaacagctccaggagtatgccgatgcggatctgtccgtcgtcgagaagctgaaggaaatcatcattcagaaggtcgacgagatctataaagtgtacgggtccagcgagaagctgttcgacgccgactttgtgctcgagaagtccctcaaaaagaatgacgccgtggtggccattatgaaagacctgctcgactccgtgaagtccttcgaaaattacattaaagcgttctttggggaggggaaggaaactaacagggatgagtccttctatggcgactttgtcctcgcgtacgacatcctgctgaaggtcgaccacatttacgacgcgatccgcaactacgtgacacagaagccgtactccaaagacaagttcaagctgtacttccagaacccgcaatttatggggggctgggacaaggataaagagacagactaccgcgcgacaattctccgctatggctccaaatactatctggccatcatggacaagaagtacgcgaagtgcctgcagaagatcgacaaagacgacgtcaatggcaactatgaaaagatcaactacaagctgctgccgggcccgaacaagatgctcccgaaggtgttcttcagcaagaagtggatggcctactacaatccaagcgaggatattcagaaaatctataaaaacgggaccttcaagaagggggacatgtttaacctcaacgactgccacaagctcattgatttcttcaaggatagcatttcccgctacccgaaatggtccaatgcgtacgattttaacttctccgagacagaaaagtacaaagacatcgcgggcttttacagggaggtggaggagcaagggtataaagtttcttttgaatccgcgagcaagaaggaagtcgacaagctcgtcgaggagggcaagctctacatgttccaaatttataacaaggacttttccgacaagagccatgggaccccaaacctccacaccatgtacttcaaactgctctttgacgagaacaaccacgggcaaatcaggctgagcggcggcgccgaattattcatgcgcagggcctccctcaagaaggaagagctggtcgtccatccagccaattccccgatcgcgaacaagaacccggacaatccgaaaaagaccaccaccctgtcctacgacgtctacaaggacaaacgcttcagcgaagaccagtacgaattacacatcccaattgcgattaataagtgcccaaagaatatcttcaaaattaatacagaggtcagggtgctgctcaaacacgacgacaatccgtatgtcatcggcattgacaggggcgagcgcaatctgctctatatcgtggtcgtggatgggaagggcaatattgtggagcagtactccctgaacgagattatcaacaacttcaatgggattaggattaagaccgactatcacagcctgctcgacaagaaagaaaaagagaggtttgaggcccgccaaaactggacctccattgagaatatcaaagaattaaaggccggctatatttcccaagtcgtccacaagatctgcgagctggtggagaaatatgacgccgtgattgcgctcgaagacttaaattctgggttcaagaactcccgcgtgaaggtggaaaaacaggtgtatcagaaattcgagaaaatgctgatcgacaaactcaattatatggtggataagaagtccaacccgtgtgccacagggggcgcgctgaagggctatcagatcaccaacaagttcgagagcttcaagagcatgagcacccagaacgggtttattttctacatcccggcgtggctcacctccaagattgacccgagcaccggcttcgtgaacctcctgaagacaaagtatacctccattgccgacagcaagaagtttatctcctccttcgaccgcattatgtatgtgccggaggaggacctcttcgagttcgccctcgactacaaaaacttcagccgcacagatgcggattacatcaagaagtggaagctgtactcctacgggaacaggatccgcatcttcaggaatccaaaaaaaaataacgtctttgactgggaggaagtgtgcctgacatccgcctacaaggaactgttcaataaatacggcatcaattaccagcagggcgacattcgcgccctcctctgtgagcagtccgacaaagcgttttactccagcttcatggccctcatgtccctgatgctccaaatgaggaatagcatcacagggcgcaccgacgtcgacttcctcatcagcccggtgaagaactccgacgggatcttttacgactcccgcaactatgaggcgcaagagaatgcgatcctcccgaagaacgccgatgcgaacggggcctataatatcgccaggaaagtgctctgggccatcgggcagttcaaaaaggcggaggatgagaagctcgacaaggtgaaaattgccatttccaacaaggagtggctggagtacgcgcagacctccgtgaagcacggatctaagaagagaagaattaaacaagattgaatagaagggctctctgtcatgatttcatactttcattattgagctctgtaattacaattatgaccatgagaacatctcttattgtgtggccttttaattgctgatgttagtactgaaccaaagcttatcgtgatgatgtaaaagcaataagtacttgtttgtagcttctttgtgtctccctttgggcttaatacatctgtttagtgttgtggctttggcatagacttctcttggtaataatgccttgcaatgcaaaatttcaattatcaaattctattatgttctcaccttatggtaacagcttaccctgtggaagatgagattcttgagttgagtcattgccaatttttggcattagcttttgaattagtgaattttgacaaaaattaccgtgacactgattttgttgaagctcttaagtgtagtttttacaaaatttcagtggctcgttgtgattatgtcaaactcacggcgaatgtagttcttacagaatttcagtggctcaaggatttaacgcgtgtatgcggccgcaaactatttaaatgcaggcgataaaaatgttttaaacgatatatattataaaaaaaaacgtttcaaaaataaatacaaaaatgtttttaaatatatataatttaactcattaaagaaaataaaaatgcaagtgcggtgacaagacaagctaaaagttgcaaaagaaatggcagggctataaggctcacctactcctggatttaccaaattttggttcgtccctatactcgaaaaataaaacaaaataaatttcagtatcttcgtttttgtatgctttgactgtgaggcgaggccaactttcttcttctgtctgagatgaattttgtttgcctcctgtgaaggatgtatcattcaaagtgaatgttttgcaactgccagtagtcccacatcgaccaaatattcttattacagtgtgtttatatagcacctggagaaggaatgggttgtttcaaagattaaataatttctactaagtgtagatcaagggactcaacatcaaaggattaatttctactaagtgtagatcaagggactcaacatcaaaggattaatttctactaagtgtagatcaagggactcaacatcaaaggattaatttctactaagtgtagatttttttttgcggccgcaacagagaaactagacctgcaggaaggcgccggcgctctcttaaggtagc

SEQ ID NO: 756 - skipped

SEQ ID NO: 757 - protein, 1391 aa, synthetic construct
RTEKENKELENLEINLRKEIAKAFKGNEGYKSLFKKDIIETILPEFLDDKDEIALVNSFNGFTTAFTGFFDNRENMFSEEAKSTSIAFRCINENLTRYISNMDIFEKVDAIFDKHEVQEIKEKILNSDYDVEDFFEGEFFNFVLTQEGIDVYNAIIGGFVTESGEKIKGLNEYINLYNQKTKQKLPKFKPLYKQVLSDRESLSFYGEGSSGENQTTQKGQKNSRERMKRIEEGIKELGSQILKEHPVENTQLQNEKLYLYYLQNGRDMYVDQELDINRLSDYDVDHIVPQSFLKDDSIDNKVLTRSDKNRGKSDNVPSEEVVKKMKNYWRQLLNAKLITQRKFDNLTKAERGGLSGYTSDEEVLEVFRNTLNKNSEIFSSIKKLEKLFKNFDEYSSAGIFVKNGPAISTISKDIFGEWNVIRDKWNAEYDDIHLKKKAVVTEKYEDDRRKSFKKIGSFSLEQLQEYADADLSVVEKLKEIIIQKVDEIYKVYGSSEKLFDADFVLEKSLKKNDAVVAIMKDLLDSVKSFENYIKAFFGEGKETNRDESFYGDFVLAYDILLKVDHIYDAIRNYVTQKPYSKDKFKLYFQNPQFMGGWDKDKETDYRATILRYGSKYYLAIMDKKYAKCLQKIDKDDVNGNYEKINYKLLPGPNKMLPKVFFSKKWMAYYNPSEDIQKIYKNGTFKKGDMFNLNDCHKLIDFFKDSISRYPKWSNAYDFNFSETEKYKDIAGFYREVEEQGYKVSFESASKKEVDKLVEEGKLYMFQIYNKDFSDKSHGTPNLHTMYFKLLFDENNHGQIRLSGGAELFMRRASLKKEELVVHPANSPIANKNPDNPKKTTTLSYDVYKDKRFSEDQYELHIPIAINKCPKNIFKINTEVRVLLKHDDNPYVIGIDRGERNLLYIVVVDGKGNIVEQYSLNEIINNFNGIRIKTDYHSLLDKKEKERFEARQNWTSIENIKELKAGYISQVVHKICELVEKYDAVIALEDLNSGFKNSRVKVEKQVYQKFEKMLIDKLNYMVDKKSNPCATGGALKGYQITNKFESFKSMSTQNGFIFYIPAWLTSKIDPSTGFVNLLKTKYTSIADSKKFISSFDRIMYVPEEDLFEFALDYKNFSRTDADYIKKWKLYSYGNRIRIFRNPKKNNVFDWEEVCLTSAYKELFNKYGINYQQGDIRALLCEQSDKAFYSSFMALMSLMLQMRNSITGRTDVDFLISPVKNSDGIFYDSRNYEAQENAILPKNADANGAYNIARKVLWAIGQFKKAEDEKLDKVKIAISNKEWLEYAQTSVKHGSSGSSGSSGSSGSSGSKLEKFTNCYSLSKTLRFKAIPVGKTQENIDNKRLLVEDEKRAEDYKGVKKLLDRYYLSFINDVLHSIKLKNLNNYISLFRKKT

SEQ ID NO: 758 - protein, 1391 aa, synthetic construct
SDGIFYDSRNYEAQENAILPKNADANGAYNIARKVLWAIGQFKKAEDEKLDKVKIAISNKEWLEYAQTSVKHGSSGSSGSSGSSGSSGSKLEKFTNCYSLSKTLRFKAIPVGKTQENIDNKRLLVEDEKRAEDYKGVKKLLDRYYLSFINDVLHSIKLKNLNNYISLFRKKTRTEKENKELENLEINLRKEIAKAFKGNEGYKSLFKKDIIETILPEFLDDKDEIALVNSFNGFTTAFTGFFDNRENMFSEEAKSTSIAFRCINENLTRYISNMDIFEKVDAIFDKHEVQEIKEKILNSDYDVEDFFEGEFFNFVLTQEGIDVYNAIIGGFVTESGEKIKGLNEYINLYNQKTKQKLPKFKPLYKQVLSDRESLSFYGEGSSGENQTTQKGQKNSRERMKRIEEGIKELGSQILKEHPVENTQLQNEKLYLYYLQNGRDMYVDQELDINRLSDYDVDHIVPQSFLKDDSIDNKVLTRSDKNRGKSDNVPSEEVVKKMKNYWRQLLNAKLITQRKFDNLTKAERGGLSGYTSDEEVLEVFRNTLNKNSEIFSSIKKLEKLFKNFDEYSSAGIFVKNGPAISTISKDIFGEWNVIRDKWNAEYDDIHLKKKAVVTEKYEDDRRKSFKKIGSFSLEQLQEYADADLSVVEKLKEIIIQKVDEIYKVYGSSEKLFDADFVLEKSLKKNDAVVAIMKDLLDSVKSFENYIKAFFGEGKETNRDESFYGDFVLAYDILLKVDHIYDAIRNYVTQKPYSKDKFKLYFQNPQFMGGWDKDKETDYRATILRYGSKYYLAIMDKKYAKCLQKIDKDDVNGNYEKINYKLLPGPNKMLPKVFFSKKWMAYYNPSEDIQKIYKNGTFKKGDMFNLNDCHKLIDFFKDSISRYPKWSNAYDFNFSETEKYKDIAGFYREVEEQGYKVSFESASKKEVDKLVEEGKLYMFQIYNKDFSDKSHGTPNLHTMYFKLLFDENNHGQIRLSGGAELFMRRASLKKEELVVHPANSPIANKNPDNPKKTTTLSYDVYKDKRFSEDQYELHIPIAINKCPKNIFKINTEVRVLLKHDDNPYVIGIDRGERNLLYIVVVDGKGNIVEQYSLNEIINNFNGIRIKTDYHSLLDKKEKERFEARQNWTSIENIKELKAGYISQVVHKICELVEKYDAVIALEDLNSGFKNSRVKVEKQVYQKFEKMLIDKLNYMVDKKSNPCATGGALKGYQITNKFESFKSMSTQNGFIFYIPAWLTSKIDPSTGFVNLLKTKYTSIADSKKFISSFDRIMYVPEEDLFEFALDYKNFSRTDADYIKKWKLYSYGNRIRIFRNPKKNNVFDWEEVCLTSAYKELFNKYGINYQQGDIRALLCEQSDKAFYSSFMALMSLMLQMRNSITGRTDVDFLISPVKN

SEQ ID NO: 759 - protein, 1391 aa, synthetic construct
KSLKKNDAVVAIMKDLLDSVKSFENYIKAFFGEGKETNRDESFYGDFVLAYDILLKVDHIYDAIRNYVTQKPYSKDKFKLYFQNPQFMGGWDKDKETDYRATILRYGSKYYLAIMDKKYAKCLQKIDKDDVNGNYEKINYKLLPGPNKMLPKVFFSKKWMAYYNPSEDIQKIYKNGTFKKGDMFNLNDCHKLIDFFKDSISRYPKWSNAYDFNFSETEKYKDIAGFYREVEEQGYKVSFESASKKEVDKLVEEGKLYMFQIYNKDFSDKSHGTPNLHTMYFKLLFDENNHGQIRLSGGAELFMRRASLKKEELVVHPANSPIANKNPDNPKKTTTLSYDVYKDKRFSEDQYELHIPIAINKCPKNIFKINTEVRVLLKHDDNPYVIGIDRGERNLLYIVVVDGKGNIVEQYSLNEIINNFNGIRIKTDYHSLLDKKEKERFEARQNWTSIENIKELKAGYISQVVHKICELVEKYDAVIALEDLNSGFKNSRVKVEKQVYQKFEKMLIDKLNYMVDKKSNPCATGGALKGYQITNKFESFKSMSTQNGFIFYIPAWLTSKIDPSTGFVNLLKTKYTSIADSKKFISSFDRIMYVPEEDLFEFALDYKNFSRTDADYIKKWKLYSYGNRIRIFRNPKKNNVFDWEEVCLTSAYKELFNKYGINYQQGDIRALLCEQSDKAFYSSFMALMSLMLQMRNSITGRTDVDFLISPVKNSDGIFYDSRNYEAQENAILPKNADANGAYNIARKVLWAIGQFKKAEDEKLDKVKIAISNKEWLEYAQTSVKHGSSGSSGSSGSSGSSGSKLEKFTNCYSLSKTLRFKAIPVGKTQENIDNKRLLVEDEKRAEDYKGVKKLLDRYYLSFINDVLHSIKLKNLNNYISLFRKKTRTEKENKELENLEINLRKEIAKAFKGNEGYKSLFKKDIIETILPEFLDDKDEIALVNSFNGFTTAFTGFFDNRENMFSEEAKSTSIAFRCINENLTRYISNMDIFEKVDAIFDKHEVQEIKEKILNSDYDVEDFFEGEFFNFVLTQEGIDVYNAIIGGFVTESGEKIKGLNEYINLYNQKTKQKLPKFKPLYKQVLSDRESLSFYGEGSSGENQTTQKGQKNSRERMKRIEEGIKELGSQILKEHPVENTQLQNEKLYLYYLQNGRDMYVDQELDINRLSDYDVDHIVPQSFLKDDSIDNKVLTRSDKNRGKSDNVPSEEVVKKMKNYWRQLLNAKLITQRKFDNLTKAERGGLSGYTSDEEVLEVFRNTLNKNSEIFSSIKKLEKLFKNFDEYSSAGIFVKNGPAISTISKDIFGEWNVIRDKWNAEYDDIHLKKKAVVTEKYEDDRRKSFKKIGSFSLEQLQEYADADLSVVEKLKEIIIQKVDEIYKVYGSSEKLFDADFVLE

SEQ ID NO: 760 - protein, 1391 aa, synthetic construct
SDKAFYSSFMALMSLMLQMRNSITGRTDVDFLISPVKNSDGIFYDSRNYEAQENAILPKNADANGAYNIARKVLWAIGQFKKAEDEKLDKVKIAISNKEWLEYAQTSVKHGSSGSSGSSGSSGSSGSKLEKFTNCYSLSKTLRFKAIPVGKTQENIDNKRLLVEDEKRAEDYKGVKKLLDRYYLSFINDVLHSIKLKNLNNYISLFRKKTRTEKENKELENLEINLRKEIAKAFKGNEGYKSLFKKDIIETILPEFLDDKDEIALVNSFNGFTTAFTGFFDNRENMFSEEAKSTSIAFRCINENLTRYISNMDIFEKVDAIFDKHEVQEIKEKILNSDYDVEDFFEGEFFNFVLTQEGIDVYNAIIGGFVTESGEKIKGLNEYINLYNQKTKQKLPKFKPLYKQVLSDRESLSFYGEGSSGENQTTQKGQKNSRERMKRIEEGIKELGSQILKEHPVENTQLQNEKLYLYYLQNGRDMYVDQELDINRLSDYDVDHIVPQSFLKDDSIDNKVLTRSDKNRGKSDNVPSEEVVKKMKNYWRQLLNAKLITQRKFDNLTKAERGGLSGYTSDEEVLEVFRNTLNKNSEIFSSIKKLEKLFKNFDEYSSAGIFVKNGPAISTISKDIFGEWNVIRDKWNAEYDDIHLKKKAVVTEKYEDDRRKSFKKIGSFSLEQLQEYADADLSVVEKLKEIIIQKVDEIYKVYGSSEKLFDADFVLEKSLKKNDAVVAIMKDLLDSVKSFENYIKAFFGEGKETNRDESFYGDFVLAYDILLKVDHIYDAIRNYVTQKPYSKDKFKLYFQNPQFMGGWDKDKETDYRATILRYGSKYYLAIMDKKYAKCLQKIDKDDVNGNYEKINYKLLPGPNKMLPKVFFSKKWMAYYNPSEDIQKIYKNGTFKKGDMFNLNDCHKLIDFFKDSISRYPKWSNAYDFNFSETEKYKDIAGFYREVEEQGYKVSFESASKKEVDKLVEEGKLYMFQIYNKDFSDKSHGTPNLHTMYFKLLFDENNHGQIRLSGGAELFMRRASLKKEELVVHPANSPIANKNPDNPKKTTTLSYDVYKDKRFSEDQYELHIPIAINKCPKNIFKINTEVRVLLKHDDNPYVIGIDRGERNLLYIVVVDGKGNIVEQYSLNEIINNFNGIRIKTDYHSLLDKKEKERFEARQNWTSIENIKELKAGYISQVVHKICELVEKYDAVIALEDLNSGFKNSRVKVEKQVYQKFEKMLIDKLNYMVDKKSNPCATGGALKGYQITNKFESFKSMSTQNGFIFYIPAWLTSKIDPSTGFVNLLKTKYTSIADSKKFISSFDRIMYVPEEDLFEFALDYKNFSRTDADYIKKWKLYSYGNRIRIFRNPKKNNVFDWEEVCLTSAYKELFNKYGINYQQGDIRALLCEQ

SEQ ID NO: 761 - protein, 1375 aa, synthetic construct
SKLEKFTNCYSLSKTLRFKAIPVGKTQENIDNKRLLVEDEKRAEDYKGVKKLLDRYYLSFINDVLHSIKLKNLNNYISLFRKKTRTEKENKELENLEINLRKEIAKAFKGNEGYKSLFKKDIIETILPEFLDDKDEIALVNSFNGFTTAFTGFFDNRENMFSEEAKSTSIAFRCINENLTRYISNMDIFEKVDAIFDKHEVQEIKEKILNSDYDVEDFFEGEFFNFVLTQEGIDVYNAIIGGFVTESGEKIKGLNEYINLYNQKTKQKLPKFKPLYKQVLSDRESLSFYGEGSSGENQTTQKGQKNSRERMKRIEEGIKELGSQILKEHPVENTQLQNEKLYLYYLQNGRDMYVDQELDINRLSDYDVDHIVPQSFLKDDSIDNKVLTRSDKNRGKSDNVPSEEVVKKMKNYWRQLLNAKLITQRKFDNLTKAERGGLSGYTSDEEVLEVFRNTLNKNSEIFSSIKKLEKLFKNFDEYSSAGIFVKNGPAISTISKDIFGEWNVIRDKWNAEYDDIHLKKKAVVTEKYEDDRRKSFKKIGSFSLEQLQEYADADLSVVEKLKEIIIQKVDEIYKVYGSSEKLFDADFVLEKSLKKNDAVVAIMKDLLDSVKSFENYIKAFFGEGKETNRDESFYGDFVLAYDILLKVDHIYDAIRNYVTQKPYSKDKFKLYFQNPQFMGGWDKDKETDYRATILRYGSKYYLAIMDKKYAKCLQKIDKDDVNGNYEKINYKLLPGPNKMLPKVFFSKKWMAYYNPSEDIQKIYKNGTFKKGDMFNLNDCHKLIDFFKDSISRYPKWSNAYDFNFSETEKYKDIAGFYREVEEQGYKVSFESASKKEVDKLVEEGKLYMFQIYNKDFSDKSHGTPNLHTMYFKLLFDENNHGQIRLSGGAELFMRRASLKKEELVVHPANSPIANKNPDNPKKTTTLSYDVYKDKRFSEDQYELHIPIAINKCPKNIFKINTEVRVLLKHDDNPYVIGIDRGERNLLYIVVVDGKGNIVEQYSLNEIINNFNGIRIKTDYHSLLDKKEKERFEARQNWTSIENIKELKAGYISQVVHKICELVEKYDAVIALEDLNSGFKNSRVKVEKQVYQKFEKMLIDKLNYMVDKKSNPCATGGALKGYQITNKFESFKSMSTQNGFIFYIPAWLTSKIDPSTGFVNLLKTKYTSIADSKKFISSFDRIMYVPEEDLFEFALDYKNFSRTDADYIKKWKLYSYGNRIRIFRNPKKNNVFDWEEVCLTSAYKELFNKYGINYQQGDIRALLCEQSDKAFYSSFMALMSLMLQMRNSITGRTDVDFLISPVKNSDGIFYDSRNYEAQENAILPKNADANGAYNIARKVLWAIGQFKKAEDEKLDKVKIAISNKEWLEYAQTSVKH

SEQ ID NO: 762 - skipped

SEQ ID NO: 763 - DNA, 4173 bp, synthetic construct
  source 1..4173: mol_type = other DNA
cgcaccgagaaggagaacaaggagctggagaacctggagatcaacctccgcaaggaaatcgccaaagcgttcaagggcaatgaagggtacaagagcctcttcaagaaagacatcatcgaaactatcctcccagagtttctcgatgacaaggacgagatcgcgctggtgaactcctttaacgggttcacaaccgcgtttaccggcttctttgataacagggaaaatatgttctccgaggaggccaagtccaccagcatcgccttcaggtgtatcaacgagaacctcacccgctacatttccaatatggacattttcgagaaggtggatgcgatcttcgataagcacgaggtgcaggagatcaaagagaagattctcaattccgattatgacgtcgaggatttcttcgaaggggagttctttaattttgtgctcacacaagagggcattgacgtgtacaacgcgattatcgggggcttcgtcacagagtccggggagaagattaaggggctgaatgagtacatcaatctgtacaatcagaagaccaagcagaaactgccgaaattcaagccgctctacaagcaagtcctgtccgatagggaaagcctctccttctacggcgagggatccagcggcgagaaccagaccacccagaagggacagaagaacagccgcgagagaatgaagcggatcgaagagggcatcaaagagctgggcagccagatcctgaaagaacaccccgtggaaaacacccagctgcagaacgagaagctgtacctgtactacctgcagaatgggcgggatatgtacgtggaccaggaactggacatcaaccggctgtccgactacgatgtggaccatatcgtgcctcagagctttctgaaggacgactccatcgacaacaaggtgctgaccagaagcgacaagaaccggggcaagagcgacaacgtgccctccgaagaggtcgtgaagaagatgaagaactactggcggcagctgctgaacgccaagctgattacccagagaaagttcgacaatctgaccaaggccgagagaggcggcctgagcggctataccagcgacgaggaggtgctggaagtcttccgcaacacactgaataagaatagcgagattttctcctccatcaagaagctcgagaagctctttaagaactttgacgagtacagctccgccgggattttcgtgaagaacgggccggcgatcagcaccatctccaaggacatctttggcgagtggaacgtcatcagggacaagtggaacgccgagtacgacgacatccacctgaagaagaaggcggtggtgaccgagaagtatgaggacgatcgcaggaagtccttcaaaaaaatcggctccttcagcctcgaacagctccaggagtatgccgatgcggatctgtccgtcgtcgagaagctgaaggaaatcatcattcagaaggtcgacgagatctataaagtgtacgggtccagcgagaagctgttcgacgccgactttgtgctcgagaagtccctcaaaaagaatgacgccgtggtggccattatgaaagacctgctcgactccgtgaagtccttcgaaaattacattaaagcgttctttggggaggggaaggaaactaacagggatgagtccttctatggcgactttgtcctcgcgtacgacatcctgctgaaggtcgaccacatttacgacgcgatccgcaactacgtgacacagaagccgtactccaaagacaagttcaagctgtacttccagaacccgcaatttatggggggctgggacaaggataaagagacagactaccgcgcgacaattctccgctatggctccaaatactatctggccatcatggacaagaagtacgcgaagtgcctgcagaagatcgacaaagacgacgtcaatggcaactatgaaaagatcaactacaagctgctgccgggcccgaacaagatgctcccgaaggtgttcttcagcaagaagtggatggcctactacaatccaagcgaggatattcagaaaatctataaaaacgggaccttcaagaagggggacatgtttaacctcaacgactgccacaagctcattgatttcttcaaggatagcatttcccgctacccgaaatggtccaatgcgtacgattttaacttctccgagacagaaaagtacaaagacatcgcgggcttttacagggaggtggaggagcaagggtataaagtttcttttgaatccgcgagcaagaaggaagtcgacaagctcgtcgaggagggcaagctctacatgttccaaatttataacaaggacttttccgacaagagccatgggaccccaaacctccacaccatgtacttcaaactgctctttgacgagaacaaccacgggcaaatcaggctgagcggcggcgccgaattattcatgcgcagggcctccctcaagaaggaagagctggtcgtccatccagccaattccccgatcgcgaacaagaacccggacaatccgaaaaagaccaccaccctgtcctacgacgtctacaaggacaaacgcttcagcgaagaccagtacgaattacacatcccaattgcgattaataagtgcccaaagaatatcttcaaaattaatacagaggtcagggtgctgctcaaacacgacgacaatccgtatgtcatcggcattgacaggggcgagcgcaatctgctctatatcgtggtcgtggatgggaagggcaatattgtggagcagtactccctgaacgagattatcaacaacttcaatgggattaggattaagaccgactatcacagcctgctcgacaagaaagaaaaagagaggtttgaggcccgccaaaactggacctccattgagaatatcaaagaattaaaggccggctatatttcccaagtcgtccacaagatctgcgagctggtggagaaatatgacgccgtgattgcgctcgaagacttaaattctgggttcaagaactcccgcgtgaaggtggaaaaacaggtgtatcagaaattcgagaaaatgctgatcgacaaactcaattatatggtggataagaagtccaacccgtgtgccacagggggcgcgctgaagggctatcagatcaccaacaagttcgagagcttcaagagcatgagcacccagaacgggtttattttctacatcccggcgtggctcacctccaagattgacccgagcaccggcttcgtgaacctcctgaagacaaagtatacctccattgccgacagcaagaagtttatctcctccttcgaccgcattatgtatgtgccggaggaggacctcttcgagttcgccctcgactacaaaaacttcagccgcacagatgcggattacatcaagaagtggaagctgtactcctacgggaacaggatccgcatcttcaggaatccaaaaaaaaataacgtctttgactgggaggaagtgtgcctgacatccgcctacaaggaactgttcaataaatacggcatcaattaccagcagggcgacattcgcgccctcctctgtgagcagtccgacaaagcgttttactccagcttcatggccctcatgtccctgatgctccaaatgaggaatagcatcacagggcgcaccgacgtcgacttcctcatcagcccggtgaagaactccgacgggatcttttacgactcccgcaactatgaggcgcaagagaatgcgatcctcccgaagaacgccgatgcgaacggggcctataatatcgccaggaaagtgctctgggccatcgggcagttcaaaaaggcggaggatgagaagctcgacaaggtgaaaattgccatttccaacaaggagtggctggagtacgcgcagacctccgtgaagcacggctcctctggcagctccggctctagcggctcctctggcagctccggctccaagctggagaagtttacaaactgttacagcctctccaaaaccctcaggtttaaagcgatcccggtgggcaagacccaggagaacatcgacaacaagaggctcctggtggaagacgagaagcgcgccgaagactacaagggcgtgaagaagctgctcgataggtactacctcagctttattaacgacgtgctgcacagcatcaaactcaagaatctcaacaactacatctccctcttccgcaaaaagacc

SEQ ID NO: 764 - DNA, 4173 bp, synthetic construct
  source 1..4173: mol_type = other DNA
tccgacgggatcttttacgactcccgcaactatgaggcgcaagagaatgcgatcctcccgaagaacgccgatgcgaacggggcctataatatcgccaggaaagtgctctgggccatcgggcagttcaaaaaggcggaggatgagaagctcgacaaggtgaaaattgccatttccaacaaggagtggctggagtacgcgcagacctccgtgaagcacggctcctctggcagctccggctctagcggctcctctggcagctccggctccaagctggagaagtttacaaactgttacagcctctccaaaaccctcaggtttaaagcgatcccggtgggcaagacccaggagaacatcgacaacaagaggctcctggtggaagacgagaagcgcgccgaagactacaagggcgtgaagaagctgctcgataggtactacctcagctttattaacgacgtgctgcacagcatcaaactcaagaatctcaacaactacatctccctcttccgcaaaaagacccgcaccgagaaggagaacaaggagctggagaacctggagatcaacctccgcaaggaaatcgccaaagcgttcaagggcaatgaagggtacaagagcctcttcaagaaagacatcatcgaaactatcctcccagagtttctcgatgacaaggacgagatcgcgctggtgaactcctttaacgggttcacaaccgcgtttaccggcttctttgataacagggaaaatatgttctccgaggaggccaagtccaccagcatcgccttcaggtgtatcaacgagaacctcacccgctacatttccaatatggacattttcgagaaggtggatgcgatcttcgataagcacgaggtgcaggagatcaaagagaagattctcaattccgattatgacgtcgaggatttcttcgaaggggagttctttaattttgtgctcacacaagagggcattgacgtgtacaacgcgattatcgggggcttcgtcacagagtccggggagaagattaaggggctgaatgagtacatcaatctgtacaatcagaagaccaagcagaaactgccgaaattcaagccgctctacaagcaagtcctgtccgatagggaaagcctctccttctacggcgagggatccagcggcgagaaccagaccacccagaagggacagaagaacagccgcgagagaatgaagcggatcgaagagggcatcaaagagctgggcagccagatcctgaaagaacaccccgtggaaaacacccagctgcagaacgagaagctgtacctgtactacctgcagaatgggcgggatatgtacgtggaccaggaactggacatcaaccggctgtccgactacgatgtggaccatatcgtgcctcagagctttctgaaggacgactccatcgacaacaaggtgctgaccagaagcgacaagaaccggggcaagagcgacaacgtgccctccgaagaggtcgtgaagaagatgaagaactactggcggcagctgctgaacgccaagctgattacccagagaaagttcgacaatctgaccaaggccgagagaggcggcctgagcggctataccagcgacgaggaggtgctggaagtcttccgcaacacactgaataagaatagcgagattttctcctccatcaagaagctcgagaagctctttaagaactttgacgagtacagctccgccgggattttcgtgaagaacgggccggcgatcagcaccatctccaaggacatctttggcgagtggaacgtcatcagggacaagtggaacgccgagtacgacgacatccacctgaagaagaaggcggtggtgaccgagaagtatgaggacgatcgcaggaagtccttcaaaaaaatcggctccttcagcctcgaacagctccaggagtatgccgatgcggatctgtccgtcgtcgagaagctgaaggaaatcatcattcagaaggtcgacgagatctataaagtgtacgggtccagcgagaagctgttcgacgccgactttgtgctcgagaagtccctcaaaaagaatgacgccgtggtggccattatgaaagacctgctcgactccgtgaagtccttcgaaaattacattaaagcgttctttggggaggggaaggaaactaacagggatgagtccttctatggcgactttgtcctcgcgtacgacatcctgctgaaggtcgaccacatttacgacgcgatccgcaactacgtgacacagaagccgtactccaaagacaagttcaagctgtacttccagaacccgcaatttatggggggctgggacaaggataaagagacagactaccgcgcgacaattctccgctatggctccaaatactatctggccatcatggacaagaagtacgcgaagtgcctgcagaagatcgacaaagacgacgtcaatggcaactatgaaaagatcaactacaagctgctgccgggcccgaacaagatgctcccgaaggtgttcttcagcaagaagtggatggcctactacaatccaagcgaggatattcagaaaatctataaaaacgggaccttcaagaagggggacatgtttaacctcaacgactgccacaagctcattgatttcttcaaggatagcatttcccgctacccgaaatggtccaatgcgtacgattttaacttctccgagacagaaaagtacaaagacatcgcgggcttttacagggaggtggaggagcaagggtataaagtttcttttgaatccgcgagcaagaaggaagtcgacaagctcgtcgaggagggcaagctctacatgttccaaatttataacaaggacttttccgacaagagccatgggaccccaaacctccacaccatgtacttcaaactgctctttgacgagaacaaccacgggcaaatcaggctgagcggcggcgccgaattattcatgcgcagggcctccctcaagaaggaagagctggtcgtccatccagccaattccccgatcgcgaacaagaacccggacaatccgaaaaagaccaccaccctgtcctacgacgtctacaaggacaaacgcttcagcgaagaccagtacgaattacacatcccaattgcgattaataagtgcccaaagaatatcttcaaaattaatacagaggtcagggtgctgctcaaacacgacgacaatccgtatgtcatcggcattgacaggggcgagcgcaatctgctctatatcgtggtcgtggatgggaagggcaatattgtggagcagtactccctgaacgagattatcaacaacttcaatgggattaggattaagaccgactatcacagcctgctcgacaagaaagaaaaagagaggtttgaggcccgccaaaactggacctccattgagaatatcaaagaattaaaggccggctatatttcccaagtcgtccacaagatctgcgagctggtggagaaatatgacgccgtgattgcgctcgaagacttaaattctgggttcaagaactcccgcgtgaaggtggaaaaacaggtgtatcagaaattcgagaaaatgctgatcgacaaactcaattatatggtggataagaagtccaacccgtgtgccacagggggcgcgctgaagggctatcagatcaccaacaagttcgagagcttcaagagcatgagcacccagaacgggtttattttctacatcccggcgtggctcacctccaagattgacccgagcaccggcttcgtgaacctcctgaagacaaagtatacctccattgccgacagcaagaagtttatctcctccttcgaccgcattatgtatgtgccggaggaggacctcttcgagttcgccctcgactacaaaaacttcagccgcacagatgcggattacatcaagaagtggaagctgtactcctacgggaacaggatccgcatcttcaggaatccaaaaaaaaataacgtctttgactgggaggaagtgtgcctgacatccgcctacaaggaactgttcaataaatacggcatcaattaccagcagggcgacattcgcgccctcctctgtgagcagtccgacaaagcgttttactccagcttcatggccctcatgtccctgatgctccaaatgaggaatagcatcacagggcgcaccgacgtcgacttcctcatcagcccggtgaagaac

SEQ ID NO: 765 - DNA, 4173 bp, synthetic construct
  source 1..4173: mol_type = other DNA
aagtccctcaaaaagaatgacgccgtggtggccattatgaaagacctgctcgactccgtgaagtccttcgaaaattacattaaagcgttctttggggaggggaaggaaactaacagggatgagtccttctatggcgactttgtcctcgcgtacgacatcctgctgaaggtcgaccacatttacgacgcgatccgcaactacgtgacacagaagccgtactccaaagacaagttcaagctgtacttccagaacccgcaatttatggggggctgggacaaggataaagagacagactaccgcgcgacaattctccgctatggctccaaatactatctggccatcatggacaagaagtacgcgaagtgcctgcagaagatcgacaaagacgacgtcaatggcaactatgaaaagatcaactacaagctgctgccgggcccgaacaagatgctcccgaaggtgttcttcagcaagaagtggatggcctactacaatccaagcgaggatattcagaaaatctataaaaacgggaccttcaagaagggggacatgtttaacctcaacgactgccacaagctcattgatttcttcaaggatagcatttcccgctacccgaaatggtccaatgcgtacgattttaacttctccgagacagaaaagtacaaagacatcgcgggcttttacagggaggtggaggagcaagggtataaagtttcttttgaatccgcgagcaagaaggaagtcgacaagctcgtcgaggagggcaagctctacatgttccaaatttataacaaggacttttccgacaagagccatgggaccccaaacctccacaccatgtacttcaaactgctctttgacgagaacaaccacgggcaaatcaggctgagcggcggcgccgaattattcatgcgcagggcctccctcaagaaggaagagctggtcgtccatccagccaattccccgatcgcgaacaagaacccggacaatccgaaaaagaccaccaccctgtcctacgacgtctacaaggacaaacgcttcagcgaagaccagtacgaattacacatcccaattgcgattaataagtgcccaaagaatatcttcaaaattaatacagaggtcagggtgctgctcaaacacgacgacaatccgtatgtcatcggcattgacaggggcgagcgcaatctgctctatatcgtggtcgtggatgggaagggcaatattgtggagcagtactccctgaacgagattatcaacaacttcaatgggattaggattaagaccgactatcacagcctgctcgacaagaaagaaaaagagaggtttgaggcccgccaaaactggacctccattgagaatatcaaagaattaaaggccggctatatttcccaagtcgtccacaagatctgcgagctggtggagaaatatgacgccgtgattgcgctcgaagacttaaattctgggttcaagaactcccgcgtgaaggtggaaaaacaggtgtatcagaaattcgagaaaatgctgatcgacaaactcaattatatggtggataagaagtccaacccgtgtgccacagggggcgcgctgaagggctatcagatcaccaacaagttcgagagcttcaagagcatgagcacccagaacgggtttattttctacatcccggcgtggctcacctccaagattgacccgagcaccggcttcgtgaacctcctgaagacaaagtatacctccattgccgacagcaagaagtttatctcctccttcgaccgcattatgtatgtgccggaggaggacctcttcgagttcgccctcgactacaaaaacttcagccgcacagatgcggattacatcaagaagtggaagctgtactcctacgggaacaggatccgcatcttcaggaatccaaaaaaaaataacgtctttgactgggaggaagtgtgcctgacatccgcctacaaggaactgttcaataaatacggcatcaattaccagcagggcgacattcgcgccctcctctgtgagcagtccgacaaagcgttttactccagcttcatggccctcatgtccctgatgctccaaatgaggaatagcatcacagggcgcaccgacgtcgacttcctcatcagcccggtgaagaactccgacgggatcttttacgactcccgcaactatgaggcgcaagagaatgcgatcctcccgaagaacgccgatgcgaacggggcctataatatcgccaggaaagtgctctgggccatcgggcagttcaaaaaggcggaggatgagaagctcgacaaggtgaaaattgccatttccaacaaggagtggctggagtacgcgcagacctccgtgaagcacggctcctctggcagctccggctctagcggctcctctggcagctccggctccaagctggagaagtttacaaactgttacagcctctccaaaaccctcaggtttaaagcgatcccggtgggcaagacccaggagaacatcgacaacaagaggctcctggtggaagacgagaagcgcgccgaagactacaagggcgtgaagaagctgctcgataggtactacctcagctttattaacgacgtgctgcacagcatcaaactcaagaatctcaacaactacatctccctcttccgcaaaaagacccgcaccgagaaggagaacaaggagctggagaacctggagatcaacctccgcaaggaaatcgccaaagcgttcaagggcaatgaagggtacaagagcctcttcaagaaagacatcatcgaaactatcctcccagagtttctcgatgacaaggacgagatcgcgctggtgaactcctttaacgggttcacaaccgcgtttaccggcttctttgataacagggaaaatatgttctccgaggaggccaagtccaccagcatcgccttcaggtgtatcaacgagaacctcacccgctacatttccaatatggacattttcgagaaggtggatgcgatcttcgataagcacgaggtgcaggagatcaaagagaagattctcaattccgattatgacgtcgaggatttcttcgaaggggagttctttaattttgtgctcacacaagagggcattgacgtgtacaacgcgattatcgggggcttcgtcacagagtccggggagaagattaaggggctgaatgagtacatcaatctgtacaatcagaagaccaagcagaaactgccgaaattcaagccgctctacaagcaagtcctgtccgatagggaaagcctctccttctacggcgagggatccagcggcgagaaccagaccacccagaagggacagaagaacagccgcgagagaatgaagcggatcgaagagggcatcaaagagctgggcagccagatcctgaaagaacaccccgtggaaaacacccagctgcagaacgagaagctgtacctgtactacctgcagaatgggcgggatatgtacgtggaccaggaactggacatcaaccggctgtccgactacgatgtggaccatatcgtgcctcagagctttctgaaggacgactccatcgacaacaaggtgctgaccagaagcgacaagaaccggggcaagagcgacaacgtgccctccgaagaggtcgtgaagaagatgaagaactactggcggcagctgctgaacgccaagctgattacccagagaaagttcgacaatctgaccaaggccgagagaggcggcctgagcggctataccagcgacgaggaggtgctggaagtcttccgcaacacactgaataagaatagcgagattttctcctccatcaagaagctcgagaagctctttaagaactttgacgagtacagctccgccgggattttcgtgaagaacgggccggcgatcagcaccatctccaaggacatctttggcgagtggaacgtcatcagggacaagtggaacgccgagtacgacgacatccacctgaagaagaaggcggtggtgaccgagaagtatgaggacgatcgcaggaagtccttcaaaaaaatcggctccttcagcctcgaacagctccaggagtatgccgatgcggatctgtccgtcgtcgagaagctgaaggaaatcatcattcagaaggtcgacgagatctataaagtgtacgggtccagcgagaagctgttcgacgccgactttgtgctcgag

SEQ ID NO: 766 - DNA, 4173 bp, synthetic construct
  source 1..4173: mol_type = other DNA
tccgacaaagcgttttactccagcttcatggccctcatgtccctgatgctccaaatgaggaatagcatcacagggcgcaccgacgtcgacttcctcatcagcccggtgaagaactccgacgggatcttttacgactcccgcaactatgaggcgcaagagaatgcgatcctcccgaagaacgccgatgcgaacggggcctataatatcgccaggaaagtgctctgggccatcgggcagttcaaaaaggcggaggatgagaagctcgacaaggtgaaaattgccatttccaacaaggagtggctggagtacgcgcagacctccgtgaagcacggctcctctggcagctccggctctagcggctcctctggcagctccggctccaagctggagaagtttacaaactgttacagcctctccaaaaccctcaggtttaaagcgatcccggtgggcaagacccaggagaacatcgacaacaagaggctcctggtggaagacgagaagcgcgccgaagactacaagggcgtgaagaagctgctcgataggtactacctcagctttattaacgacgtgctgcacagcatcaaactcaagaatctcaacaactacatctccctcttccgcaaaaagacccgcaccgagaaggagaacaaggagctggagaacctggagatcaacctccgcaaggaaatcgccaaagcgttcaagggcaatgaagggtacaagagcctcttcaagaaagacatcatcgaaactatcctcccagagtttctcgatgacaaggacgagatcgcgctggtgaactcctttaacgggttcacaaccgcgtttaccggcttctttgataacagggaaaatatgttctccgaggaggccaagtccaccagcatcgccttcaggtgtatcaacgagaacctcacccgctacatttccaatatggacattttcgagaaggtggatgcgatcttcgataagcacgaggtgcaggagatcaaagagaagattctcaattccgattatgacgtcgaggatttcttcgaaggggagttctttaattttgtgctcacacaagagggcattgacgtgtacaacgcgattatcgggggcttcgtcacagagtccggggagaagattaaggggctgaatgagtacatcaatctgtacaatcagaagaccaagcagaaactgccgaaattcaagccgctctacaagcaagtcctgtccgatagggaaagcctctccttctacggcgagggatccagcggcgagaaccagaccacccagaagggacagaagaacagccgcgagagaatgaagcggatcgaagagggcatcaaagagctgggcagccagatcctgaaagaacaccccgtggaaaacacccagctgcagaacgagaagctgtacctgtactacctgcagaatgggcgggatatgtacgtggaccaggaactggacatcaaccggctgtccgactacgatgtggaccatatcgtgcctcagagctttctgaaggacgactccatcgacaacaaggtgctgaccagaagcgacaagaaccggggcaagagcgacaacgtgccctccgaagaggtcgtgaagaagatgaagaactactggcggcagctgctgaacgccaagctgattacccagagaaagttcgacaatctgaccaaggccgagagaggcggcctgagcggctataccagcgacgaggaggtgctggaagtcttccgcaacacactgaataagaatagcgagattttctcctccatcaagaagctcgagaagctctttaagaactttgacgagtacagctccgccgggattttcgtgaagaacgggccggcgatcagcaccatctccaaggacatctttggcgagtggaacgtcatcagggacaagtggaacgccgagtacgacgacatccacctgaagaagaaggcggtggtgaccgagaagtatgaggacgatcgcaggaagtccttcaaaaaaatcggctccttcagcctcgaacagctccaggagtatgccgatgcggatctgtccgtcgtcgagaagctgaaggaaatcatcattcagaaggtcgacgagatctataaagtgtacgggtccagcgagaagctgttcgacgccgactttgtgctcgagaagtccctcaaaaagaatgacgccgtggtggccattatgaaagacctgctcgactccgtgaagtccttcgaaaattacattaaagcgttctttggggaggggaaggaaactaacagggatgagtccttctatggcgactttgtcctcgcgtacgacatcctgctgaaggtcgaccacatttacgacgcgatccgcaactacgtgacacagaagccgtactccaaagacaagttcaagctgtacttccagaacccgcaatttatggggggctgggacaaggataaagagacagactaccgcgcgacaattctccgctatggctccaaatactatctggccatcatggacaagaagtacgcgaagtgcctgcagaagatcgacaaagacgacgtcaatggcaactatgaaaagatcaactacaagctgctgccgggcccgaacaagatgctcccgaaggtgttcttcagcaagaagtggatggcctactacaatccaagcgaggatattcagaaaatctataaaaacgggaccttcaagaagggggacatgtttaacctcaacgactgccacaagctcattgatttcttcaaggatagcatttcccgctacccgaaatggtccaatgcgtacgattttaacttctccgagacagaaaagtacaaagacatcgcgggcttttacagggaggtggaggagcaagggtataaagtttcttttgaatccgcgagcaagaaggaagtcgacaagctcgtcgaggagggcaagctctacatgttccaaatttataacaaggacttttccgacaagagccatgggaccccaaacctccacaccatgtacttcaaactgctctttgacgagaacaaccacgggcaaatcaggctgagcggcggcgccgaattattcatgcgcagggcctccctcaagaaggaagagctggtcgtccatccagccaattccccgatcgcgaacaagaacccggacaatccgaaaaagaccaccaccctgtcctacgacgtctacaaggacaaacgcttcagcgaagaccagtacgaattacacatcccaattgcgattaataagtgcccaaagaatatcttcaaaattaatacagaggtcagggtgctgctcaaacacgacgacaatccgtatgtcatcggcattgacaggggcgagcgcaatctgctctatatcgtggtcgtggatgggaagggcaatattgtggagcagtactccctgaacgagattatcaacaacttcaatgggattaggattaagaccgactatcacagcctgctcgacaagaaagaaaaagagaggtttgaggcccgccaaaactggacctccattgagaatatcaaagaattaaaggccggctatatttcccaagtcgtccacaagatctgcgagctggtggagaaatatgacgccgtgattgcgctcgaagacttaaattctgggttcaagaactcccgcgtgaaggtggaaaaacaggtgtatcagaaattcgagaaaatgctgatcgacaaactcaattatatggtggataagaagtccaacccgtgtgccacagggggcgcgctgaagggctatcagatcaccaacaagttcgagagcttcaagagcatgagcacccagaacgggtttattttctacatcccggcgtggctcacctccaagattgacccgagcaccggcttcgtgaacctcctgaagacaaagtatacctccattgccgacagcaagaagtttatctcctccttcgaccgcattatgtatgtgccggaggaggacctcttcgagttcgccctcgactacaaaaacttcagccgcacagatgcggattacatcaagaagtggaagctgtactcctacgggaacaggatccgcatcttcaggaatccaaaaaaaaataacgtctttgactgggaggaagtgtgcctgacatccgcctacaaggaactgttcaataaatacggcatcaattaccagcagggcgacattcgcgccctcctctgtgagcag

SEQ ID NO: 767 - DNA, 4125 bp, synthetic construct
  source 1..4125: mol_type = other DNA
tccaagctggagaagtttacaaactgttacagcctctccaaaaccctcaggtttaaagcgatcccggtgggcaagacccaggagaacatcgacaacaagaggctcctggtggaagacgagaagcgcgccgaagactacaagggcgtgaagaagctgctcgataggtactacctcagctttattaacgacgtgctgcacagcatcaaactcaagaatctcaacaactacatctccctcttccgcaaaaagacccgcaccgagaaggagaacaaggagctggagaacctggagatcaacctccgcaaggaaatcgccaaagcgttcaagggcaatgaagggtacaagagcctcttcaagaaagacatcatcgaaactatcctcccagagtttctcgatgacaaggacgagatcgcgctggtgaactcctttaacgggttcacaaccgcgtttaccggcttctttgataacagggaaaatatgttctccgaggaggccaagtccaccagcatcgccttcaggtgtatcaacgagaacctcacccgctacatttccaatatggacattttcgagaaggtggatgcgatcttcgataagcacgaggtgcaggagatcaaagagaagattctcaattccgattatgacgtcgaggatttcttcgaaggggagttctttaattttgtgctcacacaagagggcattgacgtgtacaacgcgattatcgggggcttcgtcacagagtccggggagaagattaaggggctgaatgagtacatcaatctgtacaatcagaagaccaagcagaaactgccgaaattcaagccgctctacaagcaagtcctgtccgatagggaaagcctctccttctacggcgagggctcctctggcgaaaatcagaccacgcagaagggccaaaaaaacagccgcgagcggatgaagcggatcgaggagggcatcaaggagctggggtcgcagatcctcaaggagcacccggtggagaacacgcagctccagaacgagaagctgtacctctattacctacagaacgggcgggatatgtacgtggaccaggagctagacatcaaccgcctgtccgactacgacgtggaccatatcgtcccgcagtcgttcttgaaggacgacagcatcgacaacaaggtgctcacaagatcggataagaatcgaggcaagtccgacaacgtgccctcggaggaggtggtcaagaaaatgaaaaactactggcggcagttgctgaacgccaagctcattacgcagcggaagttcgacaacctgacgaaggctgaacgtggtgggctcagcggctataccagcgacgaggaggtgctggaagtcttccgcaacacactgaataagaatagcgagattttctcctccatcaagaagctcgagaagctctttaagaactttgacgagtacagctccgccgggattttcgtgaagaacgggccggcgatcagcaccatctccaaggacatctttggcgagtggaacgtcatcagggacaagtggaacgccgagtacgacgacatccacctgaagaagaaggcggtggtgaccgagaagtatgaggacgatcgcaggaagtccttcaaaaaaatcggctccttcagcctcgaacagctccaggagtatgccgatgcggatctgtccgtcgtcgagaagctgaaggaaatcatcattcagaaggtcgacgagatctataaagtgtacgggtccagcgagaagctgttcgacgccgactttgtgctcgagaagtccctcaaaaagaatgacgccgtggtggccattatgaaagacctgctcgactccgtgaagtccttcgaaaattacattaaagcgttctttggggaggggaaggaaactaacagggatgagtccttctatggcgactttgtcctcgcgtacgacatcctgctgaaggtcgaccacatttacgacgcgatccgcaactacgtgacacagaagccgtactccaaagacaagttcaagctgtacttccagaacccgcaatttatggggggctgggacaaggataaagagacagactaccgcgcgacaattctccgctatggctccaaatactatctggccatcatggacaagaagtacgcgaagtgcctgcagaagatcgacaaagacgacgtcaatggcaactatgaaaagatcaactacaagctgctgccgggcccgaacaagatgctcccgaaggtgttcttcagcaagaagtggatggcctactacaatccaagcgaggatattcagaaaatctataaaaacgggaccttcaagaagggggacatgtttaacctcaacgactgccacaagctcattgatttcttcaaggatagcatttcccgctacccgaaatggtccaatgcgtacgattttaacttctccgagacagaaaagtacaaagacatcgcgggcttttacagggaggtggaggagcaagggtataaagtttcttttgaatccgcgagcaagaaggaagtcgacaagctcgtcgaggagggcaagctctacatgttccaaatttataacaaggacttttccgacaagagccatgggaccccaaacctccacaccatgtacttcaaactgctctttgacgagaacaaccacgggcaaatcaggctgagcggcggcgccgaattattcatgcgcagggcctccctcaagaaggaagagctggtcgtccatccagccaattccccgatcgcgaacaagaacccggacaatccgaaaaagaccaccaccctgtcctacgacgtctacaaggacaaacgcttcagcgaagaccagtacgaattacacatcccaattgcgattaataagtgcccaaagaatatcttcaaaattaatacagaggtcagggtgctgctcaaacacgacgacaatccgtatgtcatcggcattgacaggggcgagcgcaatctgctctatatcgtggtcgtggatgggaagggcaatattgtggagcagtactccctgaacgagattatcaacaacttcaatgggattaggattaagaccgactatcacagcctgctcgacaagaaagaaaaagagaggtttgaggcccgccaaaactggacctccattgagaatatcaaagaattaaaggccggctatatttcccaagtcgtccacaagatctgcgagctggtggagaaatatgacgccgtgattgcgctcgaagacttaaattctgggttcaagaactcccgcgtgaaggtggaaaaacaggtgtatcagaaattcgagaaaatgctgatcgacaaactcaattatatggtggataagaagtccaacccgtgtgccacagggggcgcgctgaagggctatcagatcaccaacaagttcgagagcttcaagagcatgagcacccagaacgggtttattttctacatcccggcgtggctcacctccaagattgacccgagcaccggcttcgtgaacctcctgaagacaaagtatacctccattgccgacagcaagaagtttatctcctccttcgaccgcattatgtatgtgccggaggaggacctcttcgagttcgccctcgactacaaaaacttcagccgcacagatgcggattacatcaagaagtggaagctgtactcctacgggaacaggatccgcatcttcaggaatccaaaaaaaaataacgtctttgactgggaggaagtgtgcctgacatccgcctacaaggaactgttcaataaatacggcatcaattaccagcagggcgacattcgcgccctcctctgtgagcagtccgacaaagcgttttactccagcttcatggccctcatgtccctgatgctccaaatgaggaatagcatcacagggcgcaccgacgtcgacttcctcatcagcccggtgaagaactccgacgggatcttttacgactcccgcaactatgaggcgcaagagaatgcgatcctcccgaagaacgccgatgcgaacggggcctataatatcgccaggaaagtgctctgggccatcgggcagttcaaaaaggcggaggatgagaagctcgacaaggtgaaaattgccatttccaacaaggagtggctggagtacgcgcagacctccgtgaagcac

SEQ ID NO: 768 - DNA, 15987 bp, synthetic construct
  source 1..15987: mol_type = other DNA
aaggatccctgaaagcgacgttggatgttaacatctacaaattgccttttcttatcgaccatgtacgtaagcgcttacgtttttggtggacccttgaggaaactggtagctgttgtgggcctgtggactcaagatggatcattaatttccaccttcacctacgatggggggcatcgcaccggtgagtaatattgtacggctaagagcgaatttggcctgtagacctcaattgcgagctttctaatttcaaactattcgggcctaacttttggtgtgatgatgctgactggcaggatatataccgttgtaatttgagctcgtgtgaataagtcgctgtgtatgtttgtttgattgtttctgttggagtgcagcccatttcaccggacaagtcggctagattgatttagccctgatgaactgccgaggggaagccatcttgagcgcggaatgggaatggatttcgttgtacaacgacacgacagaacacccacgggaccgagcttcgaagctttaacgcttgagttaagccgcgccgcgaagcggcgtcggcttgaacgaattgttagacatcagaagaactcgtcaagaaggcgatagaaggcgatgcgctgcgaatcgggagcggcgataccgtaaagcacgaggaagcggtcagcccattcgccgccaagctcttcagcaatatcacgggtagccaacgctatgtcctgatagcggtccgccacacccagccggccacagtcgatgaatccagaaaagcggccattttccaccatgatattcggcaagcaggcatcgccatgggtcacgacgagatcctcgccgtcgggcatgcgcgccttgagcctggcgaacagttcggctggcgcgagcccctgatgctcttcgtccagatcatcctgatcgacaagaccggcttccatccgagtacgtgctcgctcgatgcgatgtttcgcttggtggtcgaatgggcaggtagccggatcaagcgtatgcagccgccgcattgcatcagccatgatggatactttctcggcaggagcaaggtgagatgacaggagatcctgccccggcacttcgcccaatagcagccagtcccttcccgcttcagtgacaacgtcgagcacagctgcgcaaggaacgcccgtcgtggccagccacgatagccgcgctgcctcgtcctgcagttcattcagggcaccggacaggtcggtcttgacaaaaagaaccgggcgcccctgcgctgacagccggaacacggcggcatcagagcagccgattgtctgttgtgcccagtcatagccgaatagcctctccacccaagcggccggagaacctgcgtgcaatccatcttgttcaatcatggctttgtttctccttcaatcattgactattgtcacgttattctgaatcgacgagaactcacatcaatctcaacaagcatctctgctcgcgaaattggtgttgtctcattaaaacgtgaccgtcaaagtctattcactaggacccaaatctctccaggtcccgcaagctagcttcgccgcccacgtttctctttcttctcatattcaattgtcaaaaaacagacctcatgaccaaaatcccttaacgtgagttttcgttccactgagcgtcagaccccgtagaaaagatcaaaggatcttcttgagatcctttttttctgcgcgtaatctgctgcttgcaaacaaaaaaaccaccgctaccagcggtggtttgtttgccggatcaagagctaccaactttttttccgaaggtaactggcttcagcagagcgcagataccaaatactgtccttctagtgtagccgtagttaggccaccacttcaagaactctgtagcaccgcctacatacctcgctctgctaatcctgttaccagtggctgctgccagtggcgataagtcgtgtcttaccgggttggactcaagacgatagttaccggataaggcgcagcggtcgggctgaacggggggttcgtgcacacagcccagcttggagcgaacgacctacaccgaactgagatacctacagcgtgagctatgagaaagcgccacgcttcccgaagggagaaaggcggacaggtatccggtaagcggcagggtcggaacaggagagcgcacgagggagcttccagggggaaacgcctggtatctttatagtcctgtcgggtttcgccacctctgacttgagcgtcgatttttgtgatgctcgtcaggggggcggagcctatggaaaaacgccagcaacgcggcctttttacggttcctggccttttgctggccttttgctcacatgttctttcctgcgttatcccctgattctgtggataaccgtattaccgcctttgagtgagctgataccgctcgccgcagccgaacgaccgagcgcagcgagtcagtgagcgaggaagcggaagagcgcctgatgcggtattttctccttacgcatctgtgcggtatttcacaccgcatatggtgcactctcagtacaatctgctctgatgccgcatagttaagccagtatacaggctctccttcacgatcaacgatcggcatggggccttcgtgcttgttgagtaatgttatcgctcccatcagagcacgcttggtactccgggaatcggatggtctgtcgatcatccaaaaaacgctcatgttttcaacctattaggtctgtggtcagctgaccacagaccatcctgctccatactcgctaattctagccaaaccgcaacgtcccctgcccgctagccttcaagagcgccattatcatcgggccaagtgaaaacttcccgagctcgctccgccgtgtcagatctcggagatagcccccgggcgaattgatgaagttcgctcgctccaaaatgcacgccatcgctgctgccgcattctccggtcccattgcctcacacgcgtcttggtaagccgacgggctgacccccagcatagaccgaaccaccaccgcagccgacatgaggtcacgccagctagcaaccgcaccgctcggcccataattgccaatggtcgggcatgctttcaggatcatcccgagggggaacgcttttatcggctcgctccttgcccggtctatttcactcggcttagcgccctgctccttttcagagcgaggttcaagttcattaacggattcgggttttgaattctgtatgtgctgctcgctctgggcagcattggtgctattattttctgaattgtctctaatttccaaccggttgattatctcttcctggagcatccacatctcttcgagaattgactctacatcagcaagcgtcggggcgcgtggaattctacccacaagttccacatagacttcctcgacagcttgccagtcgccctccgctccctcttccatagctgccgtaattagcttccgaacgtcccgtcggcaaatcgtcagactttctttggccatcctgaatgctgctcgatcggccatcacttgctgtgccatcatcgctagctcttcggaccgcgcgagaagcggagacaaatcgaagccaaacgcgcgctcgatctgaccagcgccatccttacgagcgtaacgctttccgttggcgctatccttccggacgatcaagcctgactccacgagcatggcgatgtgcctacgcaaagtcgcgccagccatcccatgcgcccgaagggcaagctgagcattcgacgggaagacgatcagctgtgcctcctgacgcaactccgtttccgggtgaaagctcaatagcgcatcaaggacggcaagactgttggactggattccaagtagttccatggccgcggacgcatctctaaagaccttccacttgtccgctgtcttgccttgtttgatatcggccagcgccgtctggcgccgcacaagcgcaagcgtcattggccgccgcccgaatggcgtcgttacacttcctgtctgcatcatctttcacctttcagcaggcaaaggaaatcagctcaccaaaacggcgctaaaaactcttgacgaggattcgaggaaatgcgattctgttcgcgctagagagacagaagggcttccgcgacggcgacgttgagggggctcttttcttttgcggtttactctccccgtttccgttggttctcagcgtggtacgcttgatacagcgctggcacatgatcgagcacgaaggtcgcaaaatcgggcgtcgccttcctgtcaatcgtgatttccagtttggccttgctctgcgtcacctgtgcaattctggtgccgtctggggtggccatgacctcgggaagtccacgcgcaacccgactgggcttcagactagcgatcaccgccttgaatcgttctgccgatggcagcgcttgaacttcctccgacatagcatatttagccacgtcggccggtgaagaaactttctcaatcagctcggcaagttgttgccaactcggccgtccaacaccaggagcggcaccaatagcatcggtcagttcagaggggagggcgtcgacgagcagaagcatcttggacaaattgctcttgtcgatcgacatcgcggcgatgacaatctctcgagaaaactgcctgttcaggcgatgtgcgaagcgcgccttttcgatgaaggtaagatcttcgcgctcattgttttcctgaccctgtgctacgaccacttgctcgtccgtcagttcgcgaacgaccgctctgaccggaagtccgagttctgaaacggcgcgtagccggcggtggccgaaggcaacctgatatcggcccggctggctcggatgcggtcgcacaaggattgggacttgctgtccttgttcccggatcgaagtaaggagcccgtcaatgtcccctcgcatacgatcctgcacgaaagacggttctattgacgaggcatccaactctatcactgcctgaccttcagcgaggcgccgctcgatctcttcggcacggctaagacgatcgttttgctctcgcagtgcgttaccaatgttcgctgtgagcttcgttgccggatcgcgctccttccttgttacgccgaggagcggcatggagcggttctttgccgtcctattgtcggcgggcgacgtttcaggggcgtcagttgacacgccaaggatgtgcttccggctcatgtgggcctaccccatgcttttttgatcagtgtttcgatctcgtcgttgacggcgttcatcgcctccaaggctcgatcataggtcgagcgcgtgaacaggccacgctccacttcgaatagagtctggtttgtcaggccagcgtccgaaaccgcggtggttttaagcatcggaaaattgaggacattttcgccaaaaatcgaccgcagataacctaccatttggttctgtggtccgtcgctcggttcgaaacgggttatcagatagcgcatccaattaaacttgaacttggcgccagcattctcgatttcacgcaaaaggttcgatgtcattgccagaaactggttcatcgacatcacatccagcatctgcggatggaccgtgacaagaatggacgtcgccgcagtcaatgcggatagcgtgagatacccaagctggggagggcagtcgatgaccacgacgtcatagttatccgcgatatcttcaattacttggctgatgcgaccataaaagagcgtgtcgccctctttgcggttcatcagcgcgcgtggcgtatcgtgttcaaactccatcagctcaaggttaccaggaatcaggtggaggtcgggaatgtaagtccctcggacgactcgttcgattgccacttgctcatcatcataccttatagcgccgtagagcgtttcgttcgggccaacgtccgtttccggttggctcccaaagagtgcagaaaggctcgcttgaggatcgagatcaatggccaagactcgatatccgcgcatagcgaggtactgcgccagatgcgcggcggtggtggtcttacccgacccacctttgaaattcatcacagagataacctgaagctgctcgccgcctcgacgatgtggcaggtagcgccggttcccgcggccgacctgatccatatacttccgaatcacatggatatcttcaattgagaacattcgcctgccacccgggctcatgctaacattcaactctggcatctcagacgcggtctgccgtaaatatgactcgccaacgccgagcagcttggacgcctccgatggcccgaatgttcgaatgcccttctcggaatgcggcgggaaaaccttaagatgatgtgcttgaagttggctcgagagggcatcggcatgacgctccatcaaggccgtcaaccctacaactacaggcgctgcttttaggacagacttcgccatctcaaacccattccttgccagtggcgatatttttcgcgaaactggaaaagttccgccgctggcaattagcgccgattctgctgtttgggcaagagcttttaggttaacagaaggttaacgccctcaggtcgaaaaactccacccaactgttatttgtatttatttccaatgccttagagagattgccatttgaatatgttcatgtattgttttagtgataatcctacaatcgtaacccaaaaagaggtcgccctctgcgcgccgtcgtccaatataggcgaagtcacccttgcgactcaggcggattctaccttgtacacgtgtcgagtggaaaagtcccatgtggatcactccgttgccccgtcgctcaccgtgttggggggaaggtgcacatggctcagttctcaatggaaattatctgcctaaccggctcagttctgcgtagaaaccaacatgcaagctccaccgggtgcaaagcggcagcggcggcaggatatattcaattgtaaatggcttcatgtccgggaaatctacatggatcagcaatgagtatgatggtcaatatggagaaaaagaaagagtaattaccaattttttttcaattcaaaaatgtagatgtccgcagcgttattataaaatgaaagtacattttgataaaacgacaaattacgatccgtcgtatttataggcgaaagcaataaacaaattattctaattcggaaatctttatttcgacgtgtctacattcacgtccaaatgggggcttagatgagaaacttcacgatcgatgcggccctgccggcgcgccactagtcaacaattggccaatctttgttctaaattgctaataaacgaccatttccgtcaattctccttggttgcaacagtctacccgtcaaatgtttactaatttataagtgtgaagtttgaattatgaaagacgaaatcgtattaaaaattcacaagaataaacaactccatagattttcaaaaaaacagtcacgagaaaaaaaccacagtccgtttgtctgctcttctagtttttattatttttctattaatagttttttgttatttcgagaataaaatttgaacgatgtccgaaccacaaaagccgagccgataaatcctaagccgagcctaactttagccgtaaccatcagtcacggctcccgggctaattcatttgaaccgaatcataatcaacggtttagatcaaactcaaaacaatctaacggcaacatagacgcgtcggtgagctaaaaagagtgtgaaagccaggtcaccatagcattgtctctcccagattttttatttgggaaataatagaagaaatagaaaaaaataaaagagtgagaaaaatcgtagagctatatattcgcacatgtactcgtttcgctttccttagtgttagctgctgccgctgttgtttctcctccatttctctatctttctctctcgctgcttctcgaatcttctgtatcatcttcttcttcttcaaggtgagtctctagatccgttcgcttgattttgctgctcgttagtcgttattgttgattctctatgccgatttcgctagatctgtttagcatgcgttgtggttttatgagaaaatctttgttttgggggttgcttgttatgtgattcgatccgtgcttgttggatcgatctgagctaattcttaaggtttatgtgttagatctatggagtttgaggattcttctcgcttctgtcgatctctcgctgttatttttgtttttttcagtgaagtgaagttgtttagttcgaaatgacttcgtgtatgctcgattgatctggttttaatcttcgatctgttaggtgttgatgtttacaagtgaattctagtgttttctcgttgagatctgtgaagtttgaacctagttttctcaataatcaacatatgaagcgatgtttgagtttcaataaacgctgctaatcttcgaaactaagttgtgatctgattcgtgtttacttcatgagcttatccaattcatttcggtttcattttactttttttttagtgaaccatggcgcaagttagcagaatctgcaatggtgtgcagaacccatctcttatctccaatctctcgaaatccagtcaacgcaaatctcccttatcggtttctctgaagacgcagcagcatccacgagcttatccgatttcgtcgtcgtggggattgaagaagagtgggatgacgttaattggctctgagcttcgtcctcttaaggtcatgtcttctgtttccacggcgtgcatgggggaagcggtgatcgccgaagtatcgactcaactatcagaggtagttggcgtcatcgagcgccatctcgaaccgacgttgctggccgtacatttgtacggctccgcagtggatggcggcctgaagccacacagtgatattgatttgctggttacggtgaccgtaaggcttgatgaaacaacgcggcgagctttgatcaacgaccttttggaaacttcggcttcccctggagagagcgagattctccgcgctgtagaagtcaccattgttgtgcacgacgacatcattccgtggcgttatccagctaagcgcgaactgcaatttggagaatggcagcgcaatgacattcttgcaggtatcttcgagccagccacgatcgacattgatctggctatcttgctgacaaaagcaagagaacatagcgttgccttggtaggtccagcggcggaggaactctttgatccggttcctgaacaggatctatttgaggcgctaaatgaaaccttaacgctatggaactcgccgcccgactgggctggcgatgagcgaaatgtagtgcttacgttgtcccgcatttggtacagcgcagtaaccggcaaaatcgcgccgaaggatgtcgctgccgactgggcaatggagcgcctgccggcccagtatcagcccgtcatacttgaagctagacaggcttatcttggacaagaagaagatcgcttggcctcgcgcgcagatcagttggaagaatttgtccactacgtgaaaggcgagatcaccaaggtagtcggcaaataaggatcaattcccgatcgttcaaacatttggcaataaagtttcttaagattgaatcctgttgccggtcttgcgatgattatcatataatttctgttgaattacgttaagcatgtaataattaacatgtaatgcatgacgttatttatgagatgggtttttatgattagagtcccgcaattatacatttaatacgcgatagaaaacaaaatatagcgcgcaaactaggataaattatcgcgcgcggtgtcatctatgttactagatcacgcgtgtatgcaatatcctgcagggtattaattaattatgccctaagacatcctggaccaatatgctgaagattatgctacctacaccaggataggacttgaagcacttaaccttgaagattggttcgaagaaccagaacccgatccacctaaccctgtggaccgccagaggatagaggacatcctggacctactgaacgtcagcaatgacgactgaaagattcccaggacaccggcggaagtggtggacccagtctaggtgcgatgcttagtcgcgcacgatgactatgtcggaaggcatctttgctttcggcaaactttagtaatactttaaggaaagtattgtacaagttaggtgcagagacaataatgcacccagctttagctttgtttatggaattattgtgtcggttgcattattggatgcctgcgtgcaccctaagcaatcaacggagaaacaaagataaaaatcaattactcacatgaaagagtattgatcacgagtcactatggagcgacaatctccagacaggatgtcagcatcttatcttcctttgaagaaagcatcatcaataacgatgtaatggtggggacatccactaagttattgctctgcaaacagctcaaaaagctactggccgacaatcataattgctcggcatgtccaggtggggcctccactagcaataatacaagctttacagcttgcagtgactcatcctccaataatggagaaaaagacgtcagcagtgacgaacaagggtcgaaagacttgcctatataagggcattctcccctcagttgaagatcatcgaaagttggagcaataaactctctcttcaacaaatctatcttttatcttttatcgccgcaatggcgggatctaagaagagaagaattaaacaagatcgcaccgagaaggagaacaaggagctggagaacctggagatcaacctccgcaaggaaatcgccaaagcgttcaagggcaatgaagggtacaagagcctcttcaagaaagacatcatcgaaactatcctcccagagtttctcgatgacaaggacgagatcgcgctggtgaactcctttaacgggttcacaaccgcgtttaccggcttctttgataacagggaaaatatgttctccgaggaggccaagtccaccagcatcgccttcaggtgtatcaacgagaacctcacccgctacatttccaatatggacattttcgagaaggtggatgcgatcttcgataagcacgaggtgcaggagatcaaagagaagattctcaattccgattatgacgtcgaggatttcttcgaaggggagttctttaattttgtgctcacacaagagggcattgacgtgtacaacgcgattatcgggggcttcgtcacagagtccggggagaagattaaggggctgaatgagtacatcaatctgtacaatcagaagaccaagcagaaactgccgaaattcaagccgctctacaagcaagtcctgtccgatagggaaagcctctccttctacggcgagaaccagaccacccagaagggacagaagaacagccgcgagagaatgaagcggatcgaagagggcatcaaagagctgggcagccagatcctgaaagaacaccccgtggaaaacacccagctgcagaacgagaagctgtacctgtactacctgcagaatgggcgggatatgtacgtggaccaggaactggacatcaaccggctgtccgactacgatgtggaccatatcgtgcctcagagctttctgaaggacgactccatcgacaacaaggtgctgaccagaagcgacaagaaccggggcaagagcgacaacgtgccctccgaagaggtcgtgaagaagatgaagaactactggcggcagctgctgaacgccaagctgattacccagagaaagttcgacaatctgaccaaggccgagagaggcggcctgagcgagggctataccagcgacgaggaggtgctggaagtcttccgcaacacactgaataagaatagcgagattttctcctccatcaagaagctcgagaagctctttaagaactttgacgagtacagctccgccgggattttcgtgaagaacgggccggcgatcagcaccatctccaaggacatctttggcgagtggaacgtcatcagggacaagtggaacgccgagtacgacgacatccacctgaagaagaaggcggtggtgaccgagaagtatgaggacgatcgcaggaagtccttcaaaaaaatcggctccttcagcctcgaacagctccaggagtatgccgatgcggatctgtccgtcgtcgagaagctgaaggaaatcatcattcagaaggtcgacgagatctataaagtgtacgggtccagcgagaagctgttcgacgccgactttgtgctcgagaagtccctcaaaaagaatgacgccgtggtggccattatgaaagacctgctcgactccgtgaagtccttcgaaaattacattaaagcgttctttggggaggggaaggaaactaacagggatgagtccttctatggcgactttgtcctcgcgtacgacatcctgctgaaggtcgaccacatttacgacgcgatccgcaactacgtgacacagaagccgtactccaaagacaagttcaagctgtacttccagaacccgcaatttatggggggctgggacaaggataaagagacagactaccgcgcgacaattctccgctatggctccaaatactatctggccatcatggacaagaagtacgcgaagtgcctgcagaagatcgacaaagacgacgtcaatggcaactatgaaaagatcaactacaagctgctgccgggcccgaacaagatgctcccgaaggtgttcttcagcaagaagtggatggcctactacaatccaagcgaggatattcagaaaatctataaaaacgggaccttcaagaagggggacatgtttaacctcaacgactgccacaagctcattgatttcttcaaggatagcatttcccgctacccgaaatggtccaatgcgtacgattttaacttctccgagacagaaaagtacaaagacatcgcgggcttttacagggaggtggaggagcaagggtataaagtttcttttgaatccgcgagcaagaaggaagtcgacaagctcgtcgaggagggcaagctctacatgttccaaatttataacaaggacttttccgacaagagccatgggaccccaaacctccacaccatgtacttcaaactgctctttgacgagaacaaccacgggcaaatcaggctgagcggcggcgccgaattattcatgcgcagggcctccctcaagaaggaagagctggtcgtccatccagccaattccccgatcgcgaacaagaacccggacaatccgaaaaagaccaccaccctgtcctacgacgtctacaaggacaaacgcttcagcgaagaccagtacgaattacacatcccaattgcgattaataagtgcccaaagaatatcttcaaaattaatacagaggtcagggtgctgctcaaacacgacgacaatccgtatgtcatcggcattgacaggggcgagcgcaatctgctctatatcgtggtcgtggatgggaagggcaatattgtggagcagtactccctgaacgagattatcaacaacttcaatgggattaggattaagaccgactatcacagcctgctcgacaagaaagaaaaagagaggtttgaggcccgccaaaactggacctccattgagaatatcaaagaattaaaggccggctatatttcccaagtcgtccacaagatctgcgagctggtggagaaatatgacgccgtgattgcgctcgaagacttaaattctgggttcaagaactcccgcgtgaaggtggaaaaacaggtgtatcagaaattcgagaaaatgctgatcgacaaactcaattatatggtggataagaagtccaacccgtgtgccacagggggcgcgctgaagggctatcagatcaccaacaagttcgagagcttcaagagcatgagcacccagaacgggtttattttctacatcccggcgtggctcacctccaagattgacccgagcaccggcttcgtgaacctcctgaagacaaagtatacctccattgccgacagcaagaagtttatctcctccttcgaccgcattatgtatgtgccggaggaggacctcttcgagttcgccctcgactacaaaaacttcagccgcacagatgcggattacatcaagaagtggaagctgtactcctacgggaacaggatccgcatcttcaggaatccaaaaaaaaataacgtctttgactgggaggaagtgtgcctgacatccgcctacaaggaactgttcaataaatacggcatcaattaccagcagggcgacattcgcgccctcctctgtgagcagtccgacaaagcgttttactccagcttcatggccctcatgtccctgatgctccaaatgaggaatagcatcacagggcgcaccgacgtcgacttcctcatcagcccggtgaagaactccgacgggatcttttacgactcccgcaactatgaggcgcaagagaatgcgatcctcccgaagaacgccgatgcgaacggggcctataatatcgccaggaaagtgctctgggccatcgggcagttcaaaaaggcggaggatgagaagctcgacaaggtgaaaattgccatttccaacaaggagtggctggagtacgcgcagacctccgtgaagcacggctcctctggcagctccggctctagcggctcctctggcagctccggctccaagctggagaagtttacaaactgttacagcctctccaaaaccctcaggtttaaagcgatcccggtgggcaagacccaggagaacatcgacaacaagaggctcctggtggaagacgagaagcgcgccgaagactacaagggcgtgaagaagctgctcgataggtactacctcagctttattaacgacgtgctgcacagcatcaaactcaagaatctcaacaactacatctccctcttccgcaaaaagaccggatctaagaagagaagaattaaacaagattgatagaagggctctctgtcatgatttcatactttcattattgagctctgtaattacaattatgaccatgagaacatctcttattgtgtggccttttaattgctgatgttagtactgaaccaaagcttatcgtgatgatgtaaaagcaataagtacttgtttgtagcttctttgtgtctccctttgggcttaatacatctgtttagtgttgtggctttggcatagacttctcttggtaataatgccttgcaatgcaaaatttcaattatcaaattctattatgttctcaccttatggtaacagcttaccctgtggaagatgagattcttgagttgagtcattgccaatttttggcattagcttttgaattagtgaattttgacaaaaattaccgtgacactgattttgttgaagctcttaagtgtagtttttacaaaatttcagtggctcgttgtgattatgtcaaactcacggcgaatgtagttcttacagaatttcagtggctcaaggatttaacgcgtgtatgcggccgcaaactatttaaatgcaggcgataaaaatgttttaaacgatatatattataaaaaaaaacgtttcaaaaataaatacaaaaatgtttttaaatatatataatttaactcattaaagaaaataaaaatgcaagtgcggtgacaagacaagctaaaagttgcaaaagaaatggcagggctataaggctcacctactcctggatttaccaaattttggttcgtccctatactcgaaaaataaaacaaaataaatttcagtatcttcgtttttgtatgctttgactgtgaggcgaggccaactttcttcttctgtctgagatgaattttgtttgcctcctgtgaaggatgtatcattcaaagtgaatgttttgcaactgccagtagtcccacatcgaccaaatattcttattacagtgtgtttatatagcacctggagaaggaatgggttgtttcaaagattaaataatttctactaagtgtagatcaagggactcaacatcaaaggattaatttctactaagtgtagatcaagggactcaacatcaaaggattaatttctactaagtgtagatcaagggactcaacatcaaaggattaatttctactaagtgtagatttttttttgcggccgcaacagagaaactagacctgcaggaaggcgccggcgctctcttaaggtagc

SEQ ID NO: 769 - DNA, 15999 bp, synthetic construct
  source 1..15999: mol_type = other DNA
aaggatccctgaaagcgacgttggatgttaacatctacaaattgccttttcttatcgaccatgtacgtaagcgcttacgtttttggtggacccttgaggaaactggtagctgttgtgggcctgtggactcaagatggatcattaatttccaccttcacctacgatggggggcatcgcaccggtgagtaatattgtacggctaagagcgaatttggcctgtagacctcaattgcgagctttctaatttcaaactattcgggcctaacttttggtgtgatgatgctgactggcaggatatataccgttgtaatttgagctcgtgtgaataagtcgctgtgtatgtttgtttgattgtttctgttggagtgcagcccatttcaccggacaagtcggctagattgatttagccctgatgaactgccgaggggaagccatcttgagcgcggaatgggaatggatttcgttgtacaacgacacgacagaacacccacgggaccgagcttcgaagctttaacgcttgagttaagccgcgccgcgaagcggcgtcggcttgaacgaattgttagacatcagaagaactcgtcaagaaggcgatagaaggcgatgcgctgcgaatcgggagcggcgataccgtaaagcacgaggaagcggtcagcccattcgccgccaagctcttcagcaatatcacgggtagccaacgctatgtcctgatagcggtccgccacacccagccggccacagtcgatgaatccagaaaagcggccattttccaccatgatattcggcaagcaggcatcgccatgggtcacgacgagatcctcgccgtcgggcatgcgcgccttgagcctggcgaacagttcggctggcgcgagcccctgatgctcttcgtccagatcatcctgatcgacaagaccggcttccatccgagtacgtgctcgctcgatgcgatgtttcgcttggtggtcgaatgggcaggtagccggatcaagcgtatgcagccgccgcattgcatcagccatgatggatactttctcggcaggagcaaggtgagatgacaggagatcctgccccggcacttcgcccaatagcagccagtcccttcccgcttcagtgacaacgtcgagcacagctgcgcaaggaacgcccgtcgtggccagccacgatagccgcgctgcctcgtcctgcagttcattcagggcaccggacaggtcggtcttgacaaaaagaaccgggcgcccctgcgctgacagccggaacacggcggcatcagagcagccgattgtctgttgtgcccagtcatagccgaatagcctctccacccaagcggccggagaacctgcgtgcaatccatcttgttcaatcatggctttgtttctccttcaatcattgactattgtcacgttattctgaatcgacgagaactcacatcaatctcaacaagcatctctgctcgcgaaattggtgttgtctcattaaaacgtgaccgtcaaagtctattcactaggacccaaatctctccaggtcccgcaagctagcttcgccgcccacgtttctctttcttctcatattcaattgtcaaaaaacagacctcatgaccaaaatcccttaacgtgagttttcgttccactgagcgtcagaccccgtagaaaagatcaaaggatcttcttgagatcctttttttctgcgcgtaatctgctgcttgcaaacaaaaaaaccaccgctaccagcggtggtttgtttgccggatcaagagctaccaactttttttccgaaggtaactggcttcagcagagcgcagataccaaatactgtccttctagtgtagccgtagttaggccaccacttcaagaactctgtagcaccgcctacatacctcgctctgctaatcctgttaccagtggctgctgccagtggcgataagtcgtgtcttaccgggttggactcaagacgatagttaccggataaggcgcagcggtcgggctgaacggggggttcgtgcacacagcccagcttggagcgaacgacctacaccgaactgagatacctacagcgtgagctatgagaaagcgccacgcttcccgaagggagaaaggcggacaggtatccggtaagcggcagggtcggaacaggagagcgcacgagggagcttccagggggaaacgcctggtatctttatagtcctgtcgggtttcgccacctctgacttgagcgtcgatttttgtgatgctcgtcaggggggcggagcctatggaaaaacgccagcaacgcggcctttttacggttcctggccttttgctggccttttgctcacatgttctttcctgcgttatcccctgattctgtggataaccgtattaccgcctttgagtgagctgataccgctcgccgcagccgaacgaccgagcgcagcgagtcagtgagcgaggaagcggaagagcgcctgatgcggtattttctccttacgcatctgtgcggtatttcacaccgcatatggtgcactctcagtacaatctgctctgatgccgcatagttaagccagtatacaggctctccttcacgatcaacgatcggcatggggccttcgtgcttgttgagtaatgttatcgctcccatcagagcacgcttggtactccgggaatcggatggtctgtcgatcatccaaaaaacgctcatgttttcaacctattaggtctgtggtcagctgaccacagaccatcctgctccatactcgctaattctagccaaaccgcaacgtcccctgcccgctagccttcaagagcgccattatcatcgggccaagtgaaaacttcccgagctcgctccgccgtgtcagatctcggagatagcccccgggcgaattgatgaagttcgctcgctccaaaatgcacgccatcgctgctgccgcattctccggtcccattgcctcacacgcgtcttggtaagccgacgggctgacccccagcatagaccgaaccaccaccgcagccgacatgaggtcacgccagctagcaaccgcaccgctcggcccataattgccaatggtcgggcatgctttcaggatcatcccgagggggaacgcttttatcggctcgctccttgcccggtctatttcactcggcttagcgccctgctccttttcagagcgaggttcaagttcattaacggattcgggttttgaattctgtatgtgctgctcgctctgggcagcattggtgctattattttctgaattgtctctaatttccaaccggttgattatctcttcctggagcatccacatctcttcgagaattgactctacatcagcaagcgtcggggcgcgtggaattctacccacaagttccacatagacttcctcgacagcttgccagtcgccctccgctccctcttccatagctgccgtaattagcttccgaacgtcccgtcggcaaatcgtcagactttctttggccatcctgaatgctgctcgatcggccatcacttgctgtgccatcatcgctagctcttcggaccgcgcgagaagcggagacaaatcgaagccaaacgcgcgctcgatctgaccagcgccatccttacgagcgtaacgctttccgttggcgctatccttccggacgatcaagcctgactccacgagcatggcgatgtgcctacgcaaagtcgcgccagccatcccatgcgcccgaagggcaagctgagcattcgacgggaagacgatcagctgtgcctcctgacgcaactccgtttccgggtgaaagctcaatagcgcatcaaggacggcaagactgttggactggattccaagtagttccatggccgcggacgcatctctaaagaccttccacttgtccgctgtcttgccttgtttgatatcggccagcgccgtctggcgccgcacaagcgcaagcgtcattggccgccgcccgaatggcgtcgttacacttcctgtctgcatcatctttcacctttcagcaggcaaaggaaatcagctcaccaaaacggcgctaaaaactcttgacgaggattcgaggaaatgcgattctgttcgcgctagagagacagaagggcttccgcgacggcgacgttgagggggctcttttcttttgcggtttactctccccgtttccgttggttctcagcgtggtacgcttgatacagcgctggcacatgatcgagcacgaaggtcgcaaaatcgggcgtcgccttcctgtcaatcgtgatttccagtttggccttgctctgcgtcacctgtgcaattctggtgccgtctggggtggccatgacctcgggaagtccacgcgcaacccgactgggcttcagactagcgatcaccgccttgaatcgttctgccgatggcagcgcttgaacttcctccgacatagcatatttagccacgtcggccggtgaagaaactttctcaatcagctcggcaagttgttgccaactcggccgtccaacaccaggagcggcaccaatagcatcggtcagttcagaggggagggcgtcgacgagcagaagcatcttggacaaattgctcttgtcgatcgacatcgcggcgatgacaatctctcgagaaaactgcctgttcaggcgatgtgcgaagcgcgccttttcgatgaaggtaagatcttcgcgctcattgttttcctgaccctgtgctacgaccacttgctcgtccgtcagttcgcgaacgaccgctctgaccggaagtccgagttctgaaacggcgcgtagccggcggtggccgaaggcaacctgatatcggcccggctggctcggatgcggtcgcacaaggattgggacttgctgtccttgttcccggatcgaagtaaggagcccgtcaatgtcccctcgcatacgatcctgcacgaaagacggttctattgacgaggcatccaactctatcactgcctgaccttcagcgaggcgccgctcgatctcttcggcacggctaagacgatcgttttgctctcgcagtgcgttaccaatgttcgctgtgagcttcgttgccggatcgcgctccttccttgttacgccgaggagcggcatggagcggttctttgccgtcctattgtcggcgggcgacgtttcaggggcgtcagttgacacgccaaggatgtgcttccggctcatgtgggcctaccccatgcttttttgatcagtgtttcgatctcgtcgttgacggcgttcatcgcctccaaggctcgatcataggtcgagcgcgtgaacaggccacgctccacttcgaatagagtctggtttgtcaggccagcgtccgaaaccgcggtggttttaagcatcggaaaattgaggacattttcgccaaaaatcgaccgcagataacctaccatttggttctgtggtccgtcgctcggttcgaaacgggttatcagatagcgcatccaattaaacttgaacttggcgccagcattctcgatttcacgcaaaaggttcgatgtcattgccagaaactggttcatcgacatcacatccagcatctgcggatggaccgtgacaagaatggacgtcgccgcagtcaatgcggatagcgtgagatacccaagctggggagggcagtcgatgaccacgacgtcatagttatccgcgatatcttcaattacttggctgatgcgaccataaaagagcgtgtcgccctctttgcggttcatcagcgcgcgtggcgtatcgtgttcaaactccatcagctcaaggttaccaggaatcaggtggaggtcgggaatgtaagtccctcggacgactcgttcgattgccacttgctcatcatcataccttatagcgccgtagagcgtttcgttcgggccaacgtccgtttccggttggctcccaaagagtgcagaaaggctcgcttgaggatcgagatcaatggccaagactcgatatccgcgcatagcgaggtactgcgccagatgcgcggcggtggtggtcttacccgacccacctttgaaattcatcacagagataacctgaagctgctcgccgcctcgacgatgtggcaggtagcgccggttcccgcggccgacctgatccatatacttccgaatcacatggatatcttcaattgagaacattcgcctgccacccgggctcatgctaacattcaactctggcatctcagacgcggtctgccgtaaatatgactcgccaacgccgagcagcttggacgcctccgatggcccgaatgttcgaatgcccttctcggaatgcggcgggaaaaccttaagatgatgtgcttgaagttggctcgagagggcatcggcatgacgctccatcaaggccgtcaaccctacaactacaggcgctgcttttaggacagacttcgccatctcaaacccattccttgccagtggcgatatttttcgcgaaactggaaaagttccgccgctggcaattagcgccgattctgctgtttgggcaagagcttttaggttaacagaaggttaacgccctcaggtcgaaaaactccacccaactgttatttgtatttatttccaatgccttagagagattgccatttgaatatgttcatgtattgttttagtgataatcctacaatcgtaacccaaaaagaggtcgccctctgcgcgccgtcgtccaatataggcgaagtcacccttgcgactcaggcggattctaccttgtacacgtgtcgagtggaaaagtcccatgtggatcactccgttgccccgtcgctcaccgtgttggggggaaggtgcacatggctcagttctcaatggaaattatctgcctaaccggctcagttctgcgtagaaaccaacatgcaagctccaccgggtgcaaagcggcagcggcggcaggatatattcaattgtaaatggcttcatgtccgggaaatctacatggatcagcaatgagtatgatggtcaatatggagaaaaagaaagagtaattaccaattttttttcaattcaaaaatgtagatgtccgcagcgttattataaaatgaaagtacattttgataaaacgacaaattacgatccgtcgtatttataggcgaaagcaataaacaaattattctaattcggaaatctttatttcgacgtgtctacattcacgtccaaatgggggcttagatgagaaacttcacgatcgatgcggccctgccggcgcgccactagtcaacaattggccaatctttgttctaaattgctaataaacgaccatttccgtcaattctccttggttgcaacagtctacccgtcaaatgtttactaatttataagtgtgaagtttgaattatgaaagacgaaatcgtattaaaaattcacaagaataaacaactccatagattttcaaaaaaacagtcacgagaaaaaaaccacagtccgtttgtctgctcttctagtttttattatttttctattaatagttttttgttatttcgagaataaaatttgaacgatgtccgaaccacaaaagccgagccgataaatcctaagccgagcctaactttagccgtaaccatcagtcacggctcccgggctaattcatttgaaccgaatcataatcaacggtttagatcaaactcaaaacaatctaacggcaacatagacgcgtcggtgagctaaaaagagtgtgaaagccaggtcaccatagcattgtctctcccagattttttatttgggaaataatagaagaaatagaaaaaaataaaagagtgagaaaaatcgtagagctatatattcgcacatgtactcgtttcgctttccttagtgttagctgctgccgctgttgtttctcctccatttctctatctttctctctcgctgcttctcgaatcttctgtatcatcttcttcttcttcaaggtgagtctctagatccgttcgcttgattttgctgctcgttagtcgttattgttgattctctatgccgatttcgctagatctgtttagcatgcgttgtggttttatgagaaaatctttgttttgggggttgcttgttatgtgattcgatccgtgcttgttggatcgatctgagctaattcttaaggtttatgtgttagatctatggagtttgaggattcttctcgcttctgtcgatctctcgctgttatttttgtttttttcagtgaagtgaagttgtttagttcgaaatgacttcgtgtatgctcgattgatctggttttaatcttcgatctgttaggtgttgatgtttacaagtgaattctagtgttttctcgttgagatctgtgaagtttgaacctagttttctcaataatcaacatatgaagcgatgtttgagtttcaataaacgctgctaatcttcgaaactaagttgtgatctgattcgtgtttacttcatgagcttatccaattcatttcggtttcattttactttttttttagtgaaccatggcgcaagttagcagaatctgcaatggtgtgcagaacccatctcttatctccaatctctcgaaatccagtcaacgcaaatctcccttatcggtttctctgaagacgcagcagcatccacgagcttatccgatttcgtcgtcgtggggattgaagaagagtgggatgacgttaattggctctgagcttcgtcctcttaaggtcatgtcttctgtttccacggcgtgcatgggggaagcggtgatcgccgaagtatcgactcaactatcagaggtagttggcgtcatcgagcgccatctcgaaccgacgttgctggccgtacatttgtacggctccgcagtggatggcggcctgaagccacacagtgatattgatttgctggttacggtgaccgtaaggcttgatgaaacaacgcggcgagctttgatcaacgaccttttggaaacttcggcttcccctggagagagcgagattctccgcgctgtagaagtcaccattgttgtgcacgacgacatcattccgtggcgttatccagctaagcgcgaactgcaatttggagaatggcagcgcaatgacattcttgcaggtatcttcgagccagccacgatcgacattgatctggctatcttgctgacaaaagcaagagaacatagcgttgccttggtaggtccagcggcggaggaactctttgatccggttcctgaacaggatctatttgaggcgctaaatgaaaccttaacgctatggaactcgccgcccgactgggctggcgatgagcgaaatgtagtgcttacgttgtcccgcatttggtacagcgcagtaaccggcaaaatcgcgccgaaggatgtcgctgccgactgggcaatggagcgcctgccggcccagtatcagcccgtcatacttgaagctagacaggcttatcttggacaagaagaagatcgcttggcctcgcgcgcagatcagttggaagaatttgtccactacgtgaaaggcgagatcaccaaggtagtcggcaaataaggatcaattcccgatcgttcaaacatttggcaataaagtttcttaagattgaatcctgttgccggtcttgcgatgattatcatataatttctgttgaattacgttaagcatgtaataattaacatgtaatgcatgacgttatttatgagatgggtttttatgattagagtcccgcaattatacatttaatacgcgatagaaaacaaaatatagcgcgcaaactaggataaattatcgcgcgcggtgtcatctatgttactagatcacgcgtgtatgcaatatcctgcagggtattaattaattatgccctaagacatcctggaccaatatgctgaagattatgctacctacaccaggataggacttgaagcacttaaccttgaagattggttcgaagaaccagaacccgatccacctaaccctgtggaccgccagaggatagaggacatcctggacctactgaacgtcagcaatgacgactgaaagattcccaggacaccggcggaagtggtggacccagtctaggtgcgatgcttagtcgcgcacgatgactatgtcggaaggcatctttgctttcggcaaactttagtaatactttaaggaaagtattgtacaagttaggtgcagagacaataatgcacccagctttagctttgtttatggaattattgtgtcggttgcattattggatgcctgcgtgcaccctaagcaatcaacggagaaacaaagataaaaatcaattactcacatgaaagagtattgatcacgagtcactatggagcgacaatctccagacaggatgtcagcatcttatcttcctttgaagaaagcatcatcaataacgatgtaatggtggggacatccactaagttattgctctgcaaacagctcaaaaagctactggccgacaatcataattgctcggcatgtccaggtggggcctccactagcaataatacaagctttacagcttgcagtgactcatcctccaataatggagaaaaagacgtcagcagtgacgaacaagggtcgaaagacttgcctatataagggcattctcccctcagttgaagatcatcgaaagttggagcaataaactctctcttcaacaaatctatcttttatcttttatcgccgcaatggcgggatctaagaagagaagaattaaacaagatcgcaccgagaaggagaacaaggagctggagaacctggagatcaacctccgcaaggaaatcgccaaagcgttcaagggcaatgaagggtacaagagcctcttcaagaaagacatcatcgaaactatcctcccagagtttctcgatgacaaggacgagatcgcgctggtgaactcctttaacgggttcacaaccgcgtttaccggcttctttgataacagggaaaatatgttctccgaggaggccaagtccaccagcatcgccttcaggtgtatcaacgagaacctcacccgctacatttccaatatggacattttcgagaaggtggatgcgatcttcgataagcacgaggtgcaggagatcaaagagaagattctcaattccgattatgacgtcgaggatttcttcgaaggggagttctttaattttgtgctcacacaagagggcattgacgtgtacaacgcgattatcgggggcttcgtcacagagtccggggagaagattaaggggctgaatgagtacatcaatctgtacaatcagaagaccaagcagaaactgccgaaattcaagccgctctacaagcaagtcctgtccgatagggaaagcctctccttctacggcgagggatccagcggcgagaaccagaccacccagaagggacagaagaacagccgcgagagaatgaagcggatcgaagagggcatcaaagagctgggcagccagatcctgaaagaacaccccgtggaaaacacccagctgcagaacgagaagctgtacctgtactacctgcagaatgggcgggatatgtacgtggaccaggaactggacatcaaccggctgtccgactacgatgtggaccatatcgtgcctcagagctttctgaaggacgactccatcgacaacaaggtgctgaccagaagcgacaagaaccggggcaagagcgacaacgtgccctccgaagaggtcgtgaagaagatgaagaactactggcggcagctgctgaacgccaagctgattacccagagaaagttcgacaatctgaccaaggccgagagaggcggcctgagcggctataccagcgacgaggaggtgctggaagtcttccgcaacacactgaataagaatagcgagattttctcctccatcaagaagctcgagaagctctttaagaactttgacgagtacagctccgccgggattttcgtgaagaacgggccggcgatcagcaccatctccaaggacatctttggcgagtggaacgtcatcagggacaagtggaacgccgagtacgacgacatccacctgaagaagaaggcggtggtgaccgagaagtatgaggacgatcgcaggaagtccttcaaaaaaatcggctccttcagcctcgaacagctccaggagtatgccgatgcggatctgtccgtcgtcgagaagctgaaggaaatcatcattcagaaggtcgacgagatctataaagtgtacgggtccagcgagaagctgttcgacgccgactttgtgctcgagaagtccctcaaaaagaatgacgccgtggtggccattatgaaagacctgctcgactccgtgaagtccttcgaaaattacattaaagcgttctttggggaggggaaggaaactaacagggatgagtccttctatggcgactttgtcctcgcgtacgacatcctgctgaaggtcgaccacatttacgacgcgatccgcaactacgtgacacagaagccgtactccaaagacaagttcaagctgtacttccagaacccgcaatttatggggggctgggacaaggataaagagacagactaccgcgcgacaattctccgctatggctccaaatactatctggccatcatggacaagaagtacgcgaagtgcctgcagaagatcgacaaagacgacgtcaatggcaactatgaaaagatcaactacaagctgctgccgggcccgaacaagatgctcccgaaggtgttcttcagcaagaagtggatggcctactacaatccaagcgaggatattcagaaaatctataaaaacgggaccttcaagaagggggacatgtttaacctcaacgactgccacaagctcattgatttcttcaaggatagcatttcccgctacccgaaatggtccaatgcgtacgattttaacttctccgagacagaaaagtacaaagacatcgcgggcttttacagggaggtggaggagcaagggtataaagtttcttttgaatccgcgagcaagaaggaagtcgacaagctcgtcgaggagggcaagctctacatgttccaaatttataacaaggacttttccgacaagagccatgggaccccaaacctccacaccatgtacttcaaactgctctttgacgagaacaaccacgggcaaatcaggctgagcggcggcgccgaattattcatgcgcagggcctccctcaagaaggaagagctggtcgtccatccagccaattccccgatcgcgaacaagaacccggacaatccgaaaaagaccaccaccctgtcctacgacgtctacaaggacaaacgcttcagcgaagaccagtacgaattacacatcccaattgcgattaataagtgcccaaagaatatcttcaaaattaatacagaggtcagggtgctgctcaaacacgacgacaatccgtatgtcatcggcattgacaggggcgagcgcaatctgctctatatcgtggtcgtggatgggaagggcaatattgtggagcagtactccctgaacgagattatcaacaacttcaatgggattaggattaagaccgactatcacagcctgctcgacaagaaagaaaaagagaggtttgaggcccgccaaaactggacctccattgagaatatcaaagaattaaaggccggctatatttcccaagtcgtccacaagatctgcgagctggtggagaaatatgacgccgtgattgcgctcgaagacttaaattctgggttcaagaactcccgcgtgaaggtggaaaaacaggtgtatcagaaattcgagaaaatgctgatcgacaaactcaattatatggtggataagaagtccaacccgtgtgccacagggggcgcgctgaagggctatcagatcaccaacaagttcgagagcttcaagagcatgagcacccagaacgggtttattttctacatcccggcgtggctcacctccaagattgacccgagcaccggcttcgtgaacctcctgaagacaaagtatacctccattgccgacagcaagaagtttatctcctccttcgaccgcattatgtatgtgccggaggaggacctcttcgagttcgccctcgactacaaaaacttcagccgcacagatgcggattacatcaagaagtggaagctgtactcctacgggaacaggatccgcatcttcaggaatccaaaaaaaaataacgtctttgactgggaggaagtgtgcctgacatccgcctacaaggaactgttcaataaatacggcatcaattaccagcagggcgacattcgcgccctcctctgtgagcagtccgacaaagcgttttactccagcttcatggccctcatgtccctgatgctccaaatgaggaatagcatcacagggcgcaccgacgtcgacttcctcatcagcccggtgaagaactccgacgggatcttttacgactcccgcaactatgaggcgcaagagaatgcgatcctcccgaagaacgccgatgcgaacggggcctataatatcgccaggaaagtgctctgggccatcgggcagttcaaaaaggcggaggatgagaagctcgacaaggtgaaaattgccatttccaacaaggagtggctggagtacgcgcagacctccgtgaagcacggctcctctggcagctccggctctagcggctcctctggcagctccggctccaagctggagaagtttacaaactgttacagcctctccaaaaccctcaggtttaaagcgatcccggtgggcaagacccaggagaacatcgacaacaagaggctcctggtggaagacgagaagcgcgccgaagactacaagggcgtgaagaagctgctcgataggtactacctcagctttattaacgacgtgctgcacagcatcaaactcaagaatctcaacaactacatctccctcttccgcaaaaagaccggatctaagaagagaagaattaaacaagattgatagaagggctctctgtcatgatttcatactttcattattgagctctgtaattacaattatgaccatgagaacatctcttattgtgtggccttttaattgctgatgttagtactgaaccaaagcttatcgtgatgatgtaaaagcaataagtacttgtttgtagcttctttgtgtctccctttgggcttaatacatctgtttagtgttgtggctttggcatagacttctcttggtaataatgccttgcaatgcaaaatttcaattatcaaattctattatgttctcaccttatggtaacagcttaccctgtggaagatgagattcttgagttgagtcattgccaatttttggcattagcttttgaattagtgaattttgacaaaaattaccgtgacactgattttgttgaagctcttaagtgtagtttttacaaaatttcagtggctcgttgtgattatgtcaaactcacggcgaatgtagttcttacagaatttcagtggctcaaggatttaacgcgtgtatgcggccgcaaactatttaaatgcaggcgataaaaatgttttaaacgatatatattataaaaaaaaacgtttcaaaaataaatacaaaaatgtttttaaatatatataatttaactcattaaagaaaataaaaatgcaagtgcggtgacaagacaagctaaaagttgcaaaagaaatggcagggctataaggctcacctactcctggatttaccaaattttggttcgtccctatactcgaaaaataaaacaaaataaatttcagtatcttcgtttttgtatgctttgactgtgaggcgaggccaactttcttcttctgtctgagatgaattttgtttgcctcctgtgaaggatgtatcattcaaagtgaatgttttgcaactgccagtagtcccacatcgaccaaatattcttattacagtgtgtttatatagcacctggagaaggaatgggttgtttcaaagattaaataatttctactaagtgtagatcaagggactcaacatcaaaggattaatttctactaagtgtagatcaagggactcaacatcaaaggattaatttctactaagtgtagatcaagggactcaacatcaaaggattaatttctactaagtgtagatttttttttgcggccgcaacagagaaactagacctgcaggaaggcgccggcgctctcttaaggtagc

SEQ ID NO: 770 - DNA, 15999 bp, synthetic construct
  source 1..15999: mol_type = other DNA
aaggatccctgaaagcgacgttggatgttaacatctacaaattgccttttcttatcgaccatgtacgtaagcgcttacgtttttggtggacccttgaggaaactggtagctgttgtgggcctgtggactcaagatggatcattaatttccaccttcacctacgatggggggcatcgcaccggtgagtaatattgtacggctaagagcgaatttggcctgtagacctcaattgcgagctttctaatttcaaactattcgggcctaacttttggtgtgatgatgctgactggcaggatatataccgttgtaatttgagctcgtgtgaataagtcgctgtgtatgtttgtttgattgtttctgttggagtgcagcccatttcaccggacaagtcggctagattgatttagccctgatgaactgccgaggggaagccatcttgagcgcggaatgggaatggatttcgttgtacaacgacacgacagaacacccacgggaccgagcttcgaagctttaacgcttgagttaagccgcgccgcgaagcggcgtcggcttgaacgaattgttagacatcagaagaactcgtcaagaaggcgatagaaggcgatgcgctgcgaatcgggagcggcgataccgtaaagcacgaggaagcggtcagcccattcgccgccaagctcttcagcaatatcacgggtagccaacgctatgtcctgatagcggtccgccacacccagccggccacagtcgatgaatccagaaaagcggccattttccaccatgatattcggcaagcaggcatcgccatgggtcacgacgagatcctcgccgtcgggcatgcgcgccttgagcctggcgaacagttcggctggcgcgagcccctgatgctcttcgtccagatcatcctgatcgacaagaccggcttccatccgagtacgtgctcgctcgatgcgatgtttcgcttggtggtcgaatgggcaggtagccggatcaagcgtatgcagccgccgcattgcatcagccatgatggatactttctcggcaggagcaaggtgagatgacaggagatcctgccccggcacttcgcccaatagcagccagtcccttcccgcttcagtgacaacgtcgagcacagctgcgcaaggaacgcccgtcgtggccagccacgatagccgcgctgcctcgtcctgcagttcattcagggcaccggacaggtcggtcttgacaaaaagaaccgggcgcccctgcgctgacagccggaacacggcggcatcagagcagccgattgtctgttgtgcccagtcatagccgaatagcctctccacccaagcggccggagaacctgcgtgcaatccatcttgttcaatcatggctttgtttctccttcaatcattgactattgtcacgttattctgaatcgacgagaactcacatcaatctcaacaagcatctctgctcgcgaaattggtgttgtctcattaaaacgtgaccgtcaaagtctattcactaggacccaaatctctccaggtcccgcaagctagcttcgccgcccacgtttctctttcttctcatattcaattgtcaaaaaacagacctcatgaccaaaatcccttaacgtgagttttcgttccactgagcgtcagaccccgtagaaaagatcaaaggatcttcttgagatcctttttttctgcgcgtaatctgctgcttgcaaacaaaaaaaccaccgctaccagcggtggtttgtttgccggatcaagagctaccaactttttttccgaaggtaactggcttcagcagagcgcagataccaaatactgtccttctagtgtagccgtagttaggccaccacttcaagaactctgtagcaccgcctacatacctcgctctgctaatcctgttaccagtggctgctgccagtggcgataagtcgtgtcttaccgggttggactcaagacgatagttaccggataaggcgcagcggtcgggctgaacggggggttcgtgcacacagcccagcttggagcgaacgacctacaccgaactgagatacctacagcgtgagctatgagaaagcgccacgcttcccgaagggagaaaggcggacaggtatccggtaagcggcagggtcggaacaggagagcgcacgagggagcttccagggggaaacgcctggtatctttatagtcctgtcgggtttcgccacctctgacttgagcgtcgatttttgtgatgctcgtcaggggggcggagcctatggaaaaacgccagcaacgcggcctttttacggttcctggccttttgctggccttttgctcacatgttctttcctgcgttatcccctgattctgtggataaccgtattaccgcctttgagtgagctgataccgctcgccgcagccgaacgaccgagcgcagcgagtcagtgagcgaggaagcggaagagcgcctgatgcggtattttctccttacgcatctgtgcggtatttcacaccgcatatggtgcactctcagtacaatctgctctgatgccgcatagttaagccagtatacaggctctccttcacgatcaacgatcggcatggggccttcgtgcttgttgagtaatgttatcgctcccatcagagcacgcttggtactccgggaatcggatggtctgtcgatcatccaaaaaacgctcatgttttcaacctattaggtctgtggtcagctgaccacagaccatcctgctccatactcgctaattctagccaaaccgcaacgtcccctgcccgctagccttcaagagcgccattatcatcgggccaagtgaaaacttcccgagctcgctccgccgtgtcagatctcggagatagcccccgggcgaattgatgaagttcgctcgctccaaaatgcacgccatcgctgctgccgcattctccggtcccattgcctcacacgcgtcttggtaagccgacgggctgacccccagcatagaccgaaccaccaccgcagccgacatgaggtcacgccagctagcaaccgcaccgctcggcccataattgccaatggtcgggcatgctttcaggatcatcccgagggggaacgcttttatcggctcgctccttgcccggtctatttcactcggcttagcgccctgctccttttcagagcgaggttcaagttcattaacggattcgggttttgaattctgtatgtgctgctcgctctgggcagcattggtgctattattttctgaattgtctctaatttccaaccggttgattatctcttcctggagcatccacatctcttcgagaattgactctacatcagcaagcgtcggggcgcgtggaattctacccacaagttccacatagacttcctcgacagcttgccagtcgccctccgctccctcttccatagctgccgtaattagcttccgaacgtcccgtcggcaaatcgtcagactttctttggccatcctgaatgctgctcgatcggccatcacttgctgtgccatcatcgctagctcttcggaccgcgcgagaagcggagacaaatcgaagccaaacgcgcgctcgatctgaccagcgccatccttacgagcgtaacgctttccgttggcgctatccttccggacgatcaagcctgactccacgagcatggcgatgtgcctacgcaaagtcgcgccagccatcccatgcgcccgaagggcaagctgagcattcgacgggaagacgatcagctgtgcctcctgacgcaactccgtttccgggtgaaagctcaatagcgcatcaaggacggcaagactgttggactggattccaagtagttccatggccgcggacgcatctctaaagaccttccacttgtccgctgtcttgccttgtttgatatcggccagcgccgtctggcgccgcacaagcgcaagcgtcattggccgccgcccgaatggcgtcgttacacttcctgtctgcatcatctttcacctttcagcaggcaaaggaaatcagctcaccaaaacggcgctaaaaactcttgacgaggattcgaggaaatgcgattctgttcgcgctagagagacagaagggcttccgcgacggcgacgttgagggggctcttttcttttgcggtttactctccccgtttccgttggttctcagcgtggtacgcttgatacagcgctggcacatgatcgagcacgaaggtcgcaaaatcgggcgtcgccttcctgtcaatcgtgatttccagtttggccttgctctgcgtcacctgtgcaattctggtgccgtctggggtggccatgacctcgggaagtccacgcgcaacccgactgggcttcagactagcgatcaccgccttgaatcgttctgccgatggcagcgcttgaacttcctccgacatagcatatttagccacgtcggccggtgaagaaactttctcaatcagctcggcaagttgttgccaactcggccgtccaacaccaggagcggcaccaatagcatcggtcagttcagaggggagggcgtcgacgagcagaagcatcttggacaaattgctcttgtcgatcgacatcgcggcgatgacaatctctcgagaaaactgcctgttcaggcgatgtgcgaagcgcgccttttcgatgaaggtaagatcttcgcgctcattgttttcctgaccctgtgctacgaccacttgctcgtccgtcagttcgcgaacgaccgctctgaccggaagtccgagttctgaaacggcgcgtagccggcggtggccgaaggcaacctgatatcggcccggctggctcggatgcggtcgcacaaggattgggacttgctgtccttgttcccggatcgaagtaaggagcccgtcaatgtcccctcgcatacgatcctgcacgaaagacggttctattgacgaggcatccaactctatcactgcctgaccttcagcgaggcgccgctcgatctcttcggcacggctaagacgatcgttttgctctcgcagtgcgttaccaatgttcgctgtgagcttcgttgccggatcgcgctccttccttgttacgccgaggagcggcatggagcggttctttgccgtcctattgtcggcgggcgacgtttcaggggcgtcagttgacacgccaaggatgtgcttccggctcatgtgggcctaccccatgcttttttgatcagtgtttcgatctcgtcgttgacggcgttcatcgcctccaaggctcgatcataggtcgagcgcgtgaacaggccacgctccacttcgaatagagtctggtttgtcaggccagcgtccgaaaccgcggtggttttaagcatcggaaaattgaggacattttcgccaaaaatcgaccgcagataacctaccatttggttctgtggtccgtcgctcggttcgaaacgggttatcagatagcgcatccaattaaacttgaacttggcgccagcattctcgatttcacgcaaaaggttcgatgtcattgccagaaactggttcatcgacatcacatccagcatctgcggatggaccgtgacaagaatggacgtcgccgcagtcaatgcggatagcgtgagatacccaagctggggagggcagtcgatgaccacgacgtcatagttatccgcgatatcttcaattacttggctgatgcgaccataaaagagcgtgtcgccctctttgcggttcatcagcgcgcgtggcgtatcgtgttcaaactccatcagctcaaggttaccaggaatcaggtggaggtcgggaatgtaagtccctcggacgactcgttcgattgccacttgctcatcatcataccttatagcgccgtagagcgtttcgttcgggccaacgtccgtttccggttggctcccaaagagtgcagaaaggctcgcttgaggatcgagatcaatggccaagactcgatatccgcgcatagcgaggtactgcgccagatgcgcggcggtggtggtcttacccgacccacctttgaaattcatcacagagataacctgaagctgctcgccgcctcgacgatgtggcaggtagcgccggttcccgcggccgacctgatccatatacttccgaatcacatggatatcttcaattgagaacattcgcctgccacccgggctcatgctaacattcaactctggcatctcagacgcggtctgccgtaaatatgactcgccaacgccgagcagcttggacgcctccgatggcccgaatgttcgaatgcccttctcggaatgcggcgggaaaaccttaagatgatgtgcttgaagttggctcgagagggcatcggcatgacgctccatcaaggccgtcaaccctacaactacaggcgctgcttttaggacagacttcgccatctcaaacccattccttgccagtggcgatatttttcgcgaaactggaaaagttccgccgctggcaattagcgccgattctgctgtttgggcaagagcttttaggttaacagaaggttaacgccctcaggtcgaaaaactccacccaactgttatttgtatttatttccaatgccttagagagattgccatttgaatatgttcatgtattgttttagtgataatcctacaatcgtaacccaaaaagaggtcgccctctgcgcgccgtcgtccaatataggcgaagtcacccttgcgactcaggcggattctaccttgtacacgtgtcgagtggaaaagtcccatgtggatcactccgttgccccgtcgctcaccgtgttggggggaaggtgcacatggctcagttctcaatggaaattatctgcctaaccggctcagttctgcgtagaaaccaacatgcaagctccaccgggtgcaaagcggcagcggcggcaggatatattcaattgtaaatggcttcatgtccgggaaatctacatggatcagcaatgagtatgatggtcaatatggagaaaaagaaagagtaattaccaattttttttcaattcaaaaatgtagatgtccgcagcgttattataaaatgaaagtacattttgataaaacgacaaattacgatccgtcgtatttataggcgaaagcaataaacaaattattctaattcggaaatctttatttcgacgtgtctacattcacgtccaaatgggggcttagatgagaaacttcacgatcgatgcggccctgccggcgcgccactagtcaacaattggccaatctttgttctaaattgctaataaacgaccatttccgtcaattctccttggttgcaacagtctacccgtcaaatgtttactaatttataagtgtgaagtttgaattatgaaagacgaaatcgtattaaaaattcacaagaataaacaactccatagattttcaaaaaaacagtcacgagaaaaaaaccacagtccgtttgtctgctcttctagtttttattatttttctattaatagttttttgttatttcgagaataaaatttgaacgatgtccgaaccacaaaagccgagccgataaatcctaagccgagcctaactttagccgtaaccatcagtcacggctcccgggctaattcatttgaaccgaatcataatcaacggtttagatcaaactcaaaacaatctaacggcaacatagacgcgtcggtgagctaaaaagagtgtgaaagccaggtcaccatagcattgtctctcccagattttttatttgggaaataatagaagaaatagaaaaaaataaaagagtgagaaaaatcgtagagctatatattcgcacatgtactcgtttcgctttccttagtgttagctgctgccgctgttgtttctcctccatttctctatctttctctctcgctgcttctcgaatcttctgtatcatcttcttcttcttcaaggtgagtctctagatccgttcgcttgattttgctgctcgttagtcgttattgttgattctctatgccgatttcgctagatctgtttagcatgcgttgtggttttatgagaaaatctttgttttgggggttgcttgttatgtgattcgatccgtgcttgttggatcgatctgagctaattcttaaggtttatgtgttagatctatggagtttgaggattcttctcgcttctgtcgatctctcgctgttatttttgtttttttcagtgaagtgaagttgtttagttcgaaatgacttcgtgtatgctcgattgatctggttttaatcttcgatctgttaggtgttgatgtttacaagtgaattctagtgttttctcgttgagatctgtgaagtttgaacctagttttctcaataatcaacatatgaagcgatgtttgagtttcaataaacgctgctaatcttcgaaactaagttgtgatctgattcgtgtttacttcatgagcttatccaattcatttcggtttcattttactttttttttagtgaaccatggcgcaagttagcagaatctgcaatggtgtgcagaacccatctcttatctccaatctctcgaaatccagtcaacgcaaatctcccttatcggtttctctgaagacgcagcagcatccacgagcttatccgatttcgtcgtcgtggggattgaagaagagtgggatgacgttaattggctctgagcttcgtcctcttaaggtcatgtcttctgtttccacggcgtgcatgggggaagcggtgatcgccgaagtatcgactcaactatcagaggtagttggcgtcatcgagcgccatctcgaaccgacgttgctggccgtacatttgtacggctccgcagtggatggcggcctgaagccacacagtgatattgatttgctggttacggtgaccgtaaggcttgatgaaacaacgcggcgagctttgatcaacgaccttttggaaacttcggcttcccctggagagagcgagattctccgcgctgtagaagtcaccattgttgtgcacgacgacatcattccgtggcgttatccagctaagcgcgaactgcaatttggagaatggcagcgcaatgacattcttgcaggtatcttcgagccagccacgatcgacattgatctggctatcttgctgacaaaagcaagagaacatagcgttgccttggtaggtccagcggcggaggaactctttgatccggttcctgaacaggatctatttgaggcgctaaatgaaaccttaacgctatggaactcgccgcccgactgggctggcgatgagcgaaatgtagtgcttacgttgtcccgcatttggtacagcgcagtaaccggcaaaatcgcgccgaaggatgtcgctgccgactgggcaatggagcgcctgccggcccagtatcagcccgtcatacttgaagctagacaggcttatcttggacaagaagaagatcgcttggcctcgcgcgcagatcagttggaagaatttgtccactacgtgaaaggcgagatcaccaaggtagtcggcaaataaggatcaattcccgatcgttcaaacatttggcaataaagtttcttaagattgaatcctgttgccggtcttgcgatgattatcatataatttctgttgaattacgttaagcatgtaataattaacatgtaatgcatgacgttatttatgagatgggtttttatgattagagtcccgcaattatacatttaatacgcgatagaaaacaaaatatagcgcgcaaactaggataaattatcgcgcgcggtgtcatctatgttactagatcacgcgtgtatgcaatatcctgcagggtattaattaattatgccctaagacatcctggaccaatatgctgaagattatgctacctacaccaggataggacttgaagcacttaaccttgaagattggttcgaagaaccagaacccgatccacctaaccctgtggaccgccagaggatagaggacatcctggacctactgaacgtcagcaatgacgactgaaagattcccaggacaccggcggaagtggtggacccagtctaggtgcgatgcttagtcgcgcacgatgactatgtcggaaggcatctttgctttcggcaaactttagtaatactttaaggaaagtattgtacaagttaggtgcagagacaataatgcacccagctttagctttgtttatggaattattgtgtcggttgcattattggatgcctgcgtgcaccctaagcaatcaacggagaaacaaagataaaaatcaattactcacatgaaagagtattgatcacgagtcactatggagcgacaatctccagacaggatgtcagcatcttatcttcctttgaagaaagcatcatcaataacgatgtaatggtggggacatccactaagttattgctctgcaaacagctcaaaaagctactggccgacaatcataattgctcggcatgtccaggtggggcctccactagcaataatacaagctttacagcttgcagtgactcatcctccaataatggagaaaaagacgtcagcagtgacgaacaagggtcgaaagacttgcctatataagggcattctcccctcagttgaagatcatcgaaagttggagcaataaactctctcttcaacaaatctatcttttatcttttatcgccgcaatggcgggatctaagaagagaagaattaaacaagattccgacgggatcttttacgactcccgcaactatgaggcgcaagagaatgcgatcctcccgaagaacgccgatgcgaacggggcctataatatcgccaggaaagtgctctgggccatcgggcagttcaaaaaggcggaggatgagaagctcgacaaggtgaaaattgccatttccaacaaggagtggctggagtacgcgcagacctccgtgaagcacggctcctctggcagctccggctctagcggctcctctggcagctccggctccaagctggagaagtttacaaactgttacagcctctccaaaaccctcaggtttaaagcgatcccggtgggcaagacccaggagaacatcgacaacaagaggctcctggtggaagacgagaagcgcgccgaagactacaagggcgtgaagaagctgctcgataggtactacctcagctttattaacgacgtgctgcacagcatcaaactcaagaatctcaacaactacatctccctcttccgcaaaaagacccgcaccgagaaggagaacaaggagctggagaacctggagatcaacctccgcaaggaaatcgccaaagcgttcaagggcaatgaagggtacaagagcctcttcaagaaagacatcatcgaaactatcctcccagagtttctcgatgacaaggacgagatcgcgctggtgaactcctttaacgggttcacaaccgcgtttaccggcttctttgataacagggaaaatatgttctccgaggaggccaagtccaccagcatcgccttcaggtgtatcaacgagaacctcacccgctacatttccaatatggacattttcgagaaggtggatgcgatcttcgataagcacgaggtgcaggagatcaaagagaagattctcaattccgattatgacgtcgaggatttcttcgaaggggagttctttaattttgtgctcacacaagagggcattgacgtgtacaacgcgattatcgggggcttcgtcacagagtccggggagaagattaaggggctgaatgagtacatcaatctgtacaatcagaagaccaagcagaaactgccgaaattcaagccgctctacaagcaagtcctgtccgatagggaaagcctctccttctacggcgagggatccagcggcgagaaccagaccacccagaagggacagaagaacagccgcgagagaatgaagcggatcgaagagggcatcaaagagctgggcagccagatcctgaaagaacaccccgtggaaaacacccagctgcagaacgagaagctgtacctgtactacctgcagaatgggcgggatatgtacgtggaccaggaactggacatcaaccggctgtccgactacgatgtggaccatatcgtgcctcagagctttctgaaggacgactccatcgacaacaaggtgctgaccagaagcgacaagaaccggggcaagagcgacaacgtgccctccgaagaggtcgtgaagaagatgaagaactactggcggcagctgctgaacgccaagctgattacccagagaaagttcgacaatctgaccaaggccgagagaggcggcctgagcggctataccagcgacgaggaggtgctggaagtcttccgcaacacactgaataagaatagcgagattttctcctccatcaagaagctcgagaagctctttaagaactttgacgagtacagctccgccgggattttcgtgaagaacgggccggcgatcagcaccatctccaaggacatctttggcgagtggaacgtcatcagggacaagtggaacgccgagtacgacgacatccacctgaagaagaaggcggtggtgaccgagaagtatgaggacgatcgcaggaagtccttcaaaaaaatcggctccttcagcctcgaacagctccaggagtatgccgatgcggatctgtccgtcgtcgagaagctgaaggaaatcatcattcagaaggtcgacgagatctataaagtgtacgggtccagcgagaagctgttcgacgccgactttgtgctcgagaagtccctcaaaaagaatgacgccgtggtggccattatgaaagacctgctcgactccgtgaagtccttcgaaaattacattaaagcgttctttggggaggggaaggaaactaacagggatgagtccttctatggcgactttgtcctcgcgtacgacatcctgctgaaggtcgaccacatttacgacgcgatccgcaactacgtgacacagaagccgtactccaaagacaagttcaagctgtacttccagaacccgcaatttatggggggctgggacaaggataaagagacagactaccgcgcgacaattctccgctatggctccaaatactatctggccatcatggacaagaagtacgcgaagtgcctgcagaagatcgacaaagacgacgtcaatggcaactatgaaaagatcaactacaagctgctgccgggcccgaacaagatgctcccgaaggtgttcttcagcaagaagtggatggcctactacaatccaagcgaggatattcagaaaatctataaaaacgggaccttcaagaagggggacatgtttaacctcaacgactgccacaagctcattgatttcttcaaggatagcatttcccgctacccgaaatggtccaatgcgtacgattttaacttctccgagacagaaaagtacaaagacatcgcgggcttttacagggaggtggaggagcaagggtataaagtttcttttgaatccgcgagcaagaaggaagtcgacaagctcgtcgaggagggcaagctctacatgttccaaatttataacaaggacttttccgacaagagccatgggaccccaaacctccacaccatgtacttcaaactgctctttgacgagaacaaccacgggcaaatcaggctgagcggcggcgccgaattattcatgcgcagggcctccctcaagaaggaagagctggtcgtccatccagccaattccccgatcgcgaacaagaacccggacaatccgaaaaagaccaccaccctgtcctacgacgtctacaaggacaaacgcttcagcgaagaccagtacgaattacacatcccaattgcgattaataagtgcccaaagaatatcttcaaaattaatacagaggtcagggtgctgctcaaacacgacgacaatccgtatgtcatcggcattgacaggggcgagcgcaatctgctctatatcgtggtcgtggatgggaagggcaatattgtggagcagtactccctgaacgagattatcaacaacttcaatgggattaggattaagaccgactatcacagcctgctcgacaagaaagaaaaagagaggtttgaggcccgccaaaactggacctccattgagaatatcaaagaattaaaggccggctatatttcccaagtcgtccacaagatctgcgagctggtggagaaatatgacgccgtgattgcgctcgaagacttaaattctgggttcaagaactcccgcgtgaaggtggaaaaacaggtgtatcagaaattcgagaaaatgctgatcgacaaactcaattatatggtggataagaagtccaacccgtgtgccacagggggcgcgctgaagggctatcagatcaccaacaagttcgagagcttcaagagcatgagcacccagaacgggtttattttctacatcccggcgtggctcacctccaagattgacccgagcaccggcttcgtgaacctcctgaagacaaagtatacctccattgccgacagcaagaagtttatctcctccttcgaccgcattatgtatgtgccggaggaggacctcttcgagttcgccctcgactacaaaaacttcagccgcacagatgcggattacatcaagaagtggaagctgtactcctacgggaacaggatccgcatcttcaggaatccaaaaaaaaataacgtctttgactgggaggaagtgtgcctgacatccgcctacaaggaactgttcaataaatacggcatcaattaccagcagggcgacattcgcgccctcctctgtgagcagtccgacaaagcgttttactccagcttcatggccctcatgtccctgatgctccaaatgaggaatagcatcacagggcgcaccgacgtcgacttcctcatcagcccggtgaagaacggatctaagaagagaagaattaaacaagattgatagaagggctctctgtcatgatttcatactttcattattgagctctgtaattacaattatgaccatgagaacatctcttattgtgtggccttttaattgctgatgttagtactgaaccaaagcttatcgtgatgatgtaaaagcaataagtacttgtttgtagcttctttgtgtctccctttgggcttaatacatctgtttagtgttgtggctttggcatagacttctcttggtaataatgccttgcaatgcaaaatttcaattatcaaattctattatgttctcaccttatggtaacagcttaccctgtggaagatgagattcttgagttgagtcattgccaatttttggcattagcttttgaattagtgaattttgacaaaaattaccgtgacactgattttgttgaagctcttaagtgtagtttttacaaaatttcagtggctcgttgtgattatgtcaaactcacggcgaatgtagttcttacagaatttcagtggctcaaggatttaacgcgtgtatgcggccgcaaactatttaaatgcaggcgataaaaatgttttaaacgatatatattataaaaaaaaacgtttcaaaaataaatacaaaaatgtttttaaatatatataatttaactcattaaagaaaataaaaatgcaagtgcggtgacaagacaagctaaaagttgcaaaagaaatggcagggctataaggctcacctactcctggatttaccaaattttggttcgtccctatactcgaaaaataaaacaaaataaatttcagtatcttcgtttttgtatgctttgactgtgaggcgaggccaactttcttcttctgtctgagatgaattttgtttgcctcctgtgaaggatgtatcattcaaagtgaatgttttgcaactgccagtagtcccacatcgaccaaatattcttattacagtgtgtttatatagcacctggagaaggaatgggttgtttcaaagattaaataatttctactaagtgtagatcaagggactcaacatcaaaggattaatttctactaagtgtagatcaagggactcaacatcaaaggattaatttctactaagtgtagatcaagggactcaacatcaaaggattaatttctactaagtgtagatttttttttgcggccgcaacagagaaactagacctgcaggaaggcgccggcgctctcttaaggtagc

SEQ ID NO: 771 - DNA, 15999 bp, synthetic construct
  source 1..15999: mol_type = other DNA
aaggatccctgaaagcgacgttggatgttaacatctacaaattgccttttcttatcgaccatgtacgtaagcgcttacgtttttggtggacccttgaggaaactggtagctgttgtgggcctgtggactcaagatggatcattaatttccaccttcacctacgatggggggcatcgcaccggtgagtaatattgtacggctaagagcgaatttggcctgtagacctcaattgcgagctttctaatttcaaactattcgggcctaacttttggtgtgatgatgctgactggcaggatatataccgttgtaatttgagctcgtgtgaataagtcgctgtgtatgtttgtttgattgtttctgttggagtgcagcccatttcaccggacaagtcggctagattgatttagccctgatgaactgccgaggggaagccatcttgagcgcggaatgggaatggatttcgttgtacaacgacacgacagaacacccacgggaccgagcttcgaagctttaacgcttgagttaagccgcgccgcgaagcggcgtcggcttgaacgaattgttagacatcagaagaactcgtcaagaaggcgatagaaggcgatgcgctgcgaatcgggagcggcgataccgtaaagcacgaggaagcggtcagcccattcgccgccaagctcttcagcaatatcacgggtagccaacgctatgtcctgatagcggtccgccacacccagccggccacagtcgatgaatccagaaaagcggccattttccaccatgatattcggcaagcaggcatcgccatgggtcacgacgagatcctcgccgtcgggcatgcgcgccttgagcctggcgaacagttcggctggcgcgagcccctgatgctcttcgtccagatcatcctgatcgacaagaccggcttccatccgagtacgtgctcgctcgatgcgatgtttcgcttggtggtcgaatgggcaggtagccggatcaagcgtatgcagccgccgcattgcatcagccatgatggatactttctcggcaggagcaaggtgagatgacaggagatcctgccccggcacttcgcccaatagcagccagtcccttcccgcttcagtgacaacgtcgagcacagctgcgcaaggaacgcccgtcgtggccagccacgatagccgcgctgcctcgtcctgcagttcattcagggcaccggacaggtcggtcttgacaaaaagaaccgggcgcccctgcgctgacagccggaacacggcggcatcagagcagccgattgtctgttgtgcccagtcatagccgaatagcctctccacccaagcggccggagaacctgcgtgcaatccatcttgttcaatcatggctttgtttctccttcaatcattgactattgtcacgttattctgaatcgacgagaactcacatcaatctcaacaagcatctctgctcgcgaaattggtgttgtctcattaaaacgtgaccgtcaaagtctattcactaggacccaaatctctccaggtcccgcaagctagcttcgccgcccacgtttctctttcttctcatattcaattgtcaaaaaacagacctcatgaccaaaatcccttaacgtgagttttcgttccactgagcgtcagaccccgtagaaaagatcaaaggatcttcttgagatcctttttttctgcgcgtaatctgctgcttgcaaacaaaaaaaccaccgctaccagcggtggtttgtttgccggatcaagagctaccaactttttttccgaaggtaactggcttcagcagagcgcagataccaaatactgtccttctagtgtagccgtagttaggccaccacttcaagaactctgtagcaccgcctacatacctcgctctgctaatcctgttaccagtggctgctgccagtggcgataagtcgtgtcttaccgggttggactcaagacgatagttaccggataaggcgcagcggtcgggctgaacggggggttcgtgcacacagcccagcttggagcgaacgacctacaccgaactgagatacctacagcgtgagctatgagaaagcgccacgcttcccgaagggagaaaggcggacaggtatccggtaagcggcagggtcggaacaggagagcgcacgagggagcttccagggggaaacgcctggtatctttatagtcctgtcgggtttcgccacctctgacttgagcgtcgatttttgtgatgctcgtcaggggggcggagcctatggaaaaacgccagcaacgcggcctttttacggttcctggccttttgctggccttttgctcacatgttctttcctgcgttatcccctgattctgtggataaccgtattaccgcctttgagtgagctgataccgctcgccgcagccgaacgaccgagcgcagcgagtcagtgagcgaggaagcggaagagcgcctgatgcggtattttctccttacgcatctgtgcggtatttcacaccgcatatggtgcactctcagtacaatctgctctgatgccgcatagttaagccagtatacaggctctccttcacgatcaacgatcggcatggggccttcgtgcttgttgagtaatgttatcgctcccatcagagcacgcttggtactccgggaatcggatggtctgtcgatcatccaaaaaacgctcatgttttcaacctattaggtctgtggtcagctgaccacagaccatcctgctccatactcgctaattctagccaaaccgcaacgtcccctgcccgctagccttcaagagcgccattatcatcgggccaagtgaaaacttcccgagctcgctccgccgtgtcagatctcggagatagcccccgggcgaattgatgaagttcgctcgctccaaaatgcacgccatcgctgctgccgcattctccggtcccattgcctcacacgcgtcttggtaagccgacgggctgacccccagcatagaccgaaccaccaccgcagccgacatgaggtcacgccagctagcaaccgcaccgctcggcccataattgccaatggtcgggcatgctttcaggatcatcccgagggggaacgcttttatcggctcgctccttgcccggtctatttcactcggcttagcgccctgctccttttcagagcgaggttcaagttcattaacggattcgggttttgaattctgtatgtgctgctcgctctgggcagcattggtgctattattttctgaattgtctctaatttccaaccggttgattatctcttcctggagcatccacatctcttcgagaattgactctacatcagcaagcgtcggggcgcgtggaattctacccacaagttccacatagacttcctcgacagcttgccagtcgccctccgctccctcttccatagctgccgtaattagcttccgaacgtcccgtcggcaaatcgtcagactttctttggccatcctgaatgctgctcgatcggccatcacttgctgtgccatcatcgctagctcttcggaccgcgcgagaagcggagacaaatcgaagccaaacgcgcgctcgatctgaccagcgccatccttacgagcgtaacgctttccgttggcgctatccttccggacgatcaagcctgactccacgagcatggcgatgtgcctacgcaaagtcgcgccagccatcccatgcgcccgaagggcaagctgagcattcgacgggaagacgatcagctgtgcctcctgacgcaactccgtttccgggtgaaagctcaatagcgcatcaaggacggcaagactgttggactggattccaagtagttccatggccgcggacgcatctctaaagaccttccacttgtccgctgtcttgccttgtttgatatcggccagcgccgtctggcgccgcacaagcgcaagcgtcattggccgccgcccgaatggcgtcgttacacttcctgtctgcatcatctttcacctttcagcaggcaaaggaaatcagctcaccaaaacggcgctaaaaactcttgacgaggattcgaggaaatgcgattctgttcgcgctagagagacagaagggcttccgcgacggcgacgttgagggggctcttttcttttgcggtttactctccccgtttccgttggttctcagcgtggtacgcttgatacagcgctggcacatgatcgagcacgaaggtcgcaaaatcgggcgtcgccttcctgtcaatcgtgatttccagtttggccttgctctgcgtcacctgtgcaattctggtgccgtctggggtggccatgacctcgggaagtccacgcgcaacccgactgggcttcagactagcgatcaccgccttgaatcgttctgccgatggcagcgcttgaacttcctccgacatagcatatttagccacgtcggccggtgaagaaactttctcaatcagctcggcaagttgttgccaactcggccgtccaacaccaggagcggcaccaatagcatcggtcagttcagaggggagggcgtcgacgagcagaagcatcttggacaaattgctcttgtcgatcgacatcgcggcgatgacaatctctcgagaaaactgcctgttcaggcgatgtgcgaagcgcgccttttcgatgaaggtaagatcttcgcgctcattgttttcctgaccctgtgctacgaccacttgctcgtccgtcagttcgcgaacgaccgctctgaccggaagtccgagttctgaaacggcgcgtagccggcggtggccgaaggcaacctgatatcggcccggctggctcggatgcggtcgcacaaggattgggacttgctgtccttgttcccggatcgaagtaaggagcccgtcaatgtcccctcgcatacgatcctgcacgaaagacggttctattgacgaggcatccaactctatcactgcctgaccttcagcgaggcgccgctcgatctcttcggcacggctaagacgatcgttttgctctcgcagtgcgttaccaatgttcgctgtgagcttcgttgccggatcgcgctccttccttgttacgccgaggagcggcatggagcggttctttgccgtcctattgtcggcgggcgacgtttcaggggcgtcagttgacacgccaaggatgtgcttccggctcatgtgggcctaccccatgcttttttgatcagtgtttcgatctcgtcgttgacggcgttcatcgcctccaaggctcgatcataggtcgagcgcgtgaacaggccacgctccacttcgaatagagtctggtttgtcaggccagcgtccgaaaccgcggtggttttaagcatcggaaaattgaggacattttcgccaaaaatcgaccgcagataacctaccatttggttctgtggtccgtcgctcggttcgaaacgggttatcagatagcgcatccaattaaacttgaacttggcgccagcattctcgatttcacgcaaaaggttcgatgtcattgccagaaactggttcatcgacatcacatccagcatctgcggatggaccgtgacaagaatggacgtcgccgcagtcaatgcggatagcgtgagatacccaagctggggagggcagtcgatgaccacgacgtcatagttatccgcgatatcttcaattacttggctgatgcgaccataaaagagcgtgtcgccctctttgcggttcatcagcgcgcgtggcgtatcgtgttcaaactccatcagctcaaggttaccaggaatcaggtggaggtcgggaatgtaagtccctcggacgactcgttcgattgccacttgctcatcatcataccttatagcgccgtagagcgtttcgttcgggccaacgtccgtttccggttggctcccaaagagtgcagaaaggctcgcttgaggatcgagatcaatggccaagactcgatatccgcgcatagcgaggtactgcgccagatgcgcggcggtggtggtcttacccgacccacctttgaaattcatcacagagataacctgaagctgctcgccgcctcgacgatgtggcaggtagcgccggttcccgcggccgacctgatccatatacttccgaatcacatggatatcttcaattgagaacattcgcctgccacccgggctcatgctaacattcaactctggcatctcagacgcggtctgccgtaaatatgactcgccaacgccgagcagcttggacgcctccgatggcccgaatgttcgaatgcccttctcggaatgcggcgggaaaaccttaagatgatgtgcttgaagttggctcgagagggcatcggcatgacgctccatcaaggccgtcaaccctacaactacaggcgctgcttttaggacagacttcgccatctcaaacccattccttgccagtggcgatatttttcgcgaaactggaaaagttccgccgctggcaattagcgccgattctgctgtttgggcaagagcttttaggttaacagaaggttaacgccctcaggtcgaaaaactccacccaactgttatttgtatttatttccaatgccttagagagattgccatttgaatatgttcatgtattgttttagtgataatcctacaatcgtaacccaaaaagaggtcgccctctgcgcgccgtcgtccaatataggcgaagtcacccttgcgactcaggcggattctaccttgtacacgtgtcgagtggaaaagtcccatgtggatcactccgttgccccgtcgctcaccgtgttggggggaaggtgcacatggctcagttctcaatggaaattatctgcctaaccggctcagttctgcgtagaaaccaacatgcaagctccaccgggtgcaaagcggcagcggcggcaggatatattcaattgtaaatggcttcatgtccgggaaatctacatggatcagcaatgagtatgatggtcaatatggagaaaaagaaagagtaattaccaattttttttcaattcaaaaatgtagatgtccgcagcgttattataaaatgaaagtacattttgataaaacgacaaattacgatccgtcgtatttataggcgaaagcaataaacaaattattctaattcggaaatctttatttcgacgtgtctacattcacgtccaaatgggggcttagatgagaaacttcacgatcgatgcggccctgccggcgcgccactagtcaacaattggccaatctttgttctaaattgctaataaacgaccatttccgtcaattctccttggttgcaacagtctacccgtcaaatgtttactaatttataagtgtgaagtttgaattatgaaagacgaaatcgtattaaaaattcacaagaataaacaactccatagattttcaaaaaaacagtcacgagaaaaaaaccacagtccgtttgtctgctcttctagtttttattatttttctattaatagttttttgttatttcgagaataaaatttgaacgatgtccgaaccacaaaagccgagccgataaatcctaagccgagcctaactttagccgtaaccatcagtcacggctcccgggctaattcatttgaaccgaatcataatcaacggtttagatcaaactcaaaacaatctaacggcaacatagacgcgtcggtgagctaaaaagagtgtgaaagccaggtcaccatagcattgtctctcccagattttttatttgggaaataatagaagaaatagaaaaaaataaaagagtgagaaaaatcgtagagctatatattcgcacatgtactcgtttcgctttccttagtgttagctgctgccgctgttgtttctcctccatttctctatctttctctctcgctgcttctcgaatcttctgtatcatcttcttcttcttcaaggtgagtctctagatccgttcgcttgattttgctgctcgttagtcgttattgttgattctctatgccgatttcgctagatctgtttagcatgcgttgtggttttatgagaaaatctttgttttgggggttgcttgttatgtgattcgatccgtgcttgttggatcgatctgagctaattcttaaggtttatgtgttagatctatggagtttgaggattcttctcgcttctgtcgatctctcgctgttatttttgtttttttcagtgaagtgaagttgtttagttcgaaatgacttcgtgtatgctcgattgatctggttttaatcttcgatctgttaggtgttgatgtttacaagtgaattctagtgttttctcgttgagatctgtgaagtttgaacctagttttctcaataatcaacatatgaagcgatgtttgagtttcaataaacgctgctaatcttcgaaactaagttgtgatctgattcgtgtttacttcatgagcttatccaattcatttcggtttcattttactttttttttagtgaaccatggcgcaagttagcagaatctgcaatggtgtgcagaacccatctcttatctccaatctctcgaaatccagtcaacgcaaatctcccttatcggtttctctgaagacgcagcagcatccacgagcttatccgatttcgtcgtcgtggggattgaagaagagtgggatgacgttaattggctctgagcttcgtcctcttaaggtcatgtcttctgtttccacggcgtgcatgggggaagcggtgatcgccgaagtatcgactcaactatcagaggtagttggcgtcatcgagcgccatctcgaaccgacgttgctggccgtacatttgtacggctccgcagtggatggcggcctgaagccacacagtgatattgatttgctggttacggtgaccgtaaggcttgatgaaacaacgcggcgagctttgatcaacgaccttttggaaacttcggcttcccctggagagagcgagattctccgcgctgtagaagtcaccattgttgtgcacgacgacatcattccgtggcgttatccagctaagcgcgaactgcaatttggagaatggcagcgcaatgacattcttgcaggtatcttcgagccagccacgatcgacattgatctggctatcttgctgacaaaagcaagagaacatagcgttgccttggtaggtccagcggcggaggaactctttgatccggttcctgaacaggatctatttgaggcgctaaatgaaaccttaacgctatggaactcgccgcccgactgggctggcgatgagcgaaatgtagtgcttacgttgtcccgcatttggtacagcgcagtaaccggcaaaatcgcgccgaaggatgtcgctgccgactgggcaatggagcgcctgccggcccagtatcagcccgtcatacttgaagctagacaggcttatcttggacaagaagaagatcgcttggcctcgcgcgcagatcagttggaagaatttgtccactacgtgaaaggcgagatcaccaaggtagtcggcaaataaggatcaattcccgatcgttcaaacatttggcaataaagtttcttaagattgaatcctgttgccggtcttgcgatgattatcatataatttctgttgaattacgttaagcatgtaataattaacatgtaatgcatgacgttatttatgagatgggtttttatgattagagtcccgcaattatacatttaatacgcgatagaaaacaaaatatagcgcgcaaactaggataaattatcgcgcgcggtgtcatctatgttactagatcacgcgtgtatgcaatatcctgcagggtattaattaattatgccctaagacatcctggaccaatatgctgaagattatgctacctacaccaggataggacttgaagcacttaaccttgaagattggttcgaagaaccagaacccgatccacctaaccctgtggaccgccagaggatagaggacatcctggacctactgaacgtcagcaatgacgactgaaagattcccaggacaccggcggaagtggtggacccagtctaggtgcgatgcttagtcgcgcacgatgactatgtcggaaggcatctttgctttcggcaaactttagtaatactttaaggaaagtattgtacaagttaggtgcagagacaataatgcacccagctttagctttgtttatggaattattgtgtcggttgcattattggatgcctgcgtgcaccctaagcaatcaacggagaaacaaagataaaaatcaattactcacatgaaagagtattgatcacgagtcactatggagcgacaatctccagacaggatgtcagcatcttatcttcctttgaagaaagcatcatcaataacgatgtaatggtggggacatccactaagttattgctctgcaaacagctcaaaaagctactggccgacaatcataattgctcggcatgtccaggtggggcctccactagcaataatacaagctttacagcttgcagtgactcatcctccaataatggagaaaaagacgtcagcagtgacgaacaagggtcgaaagacttgcctatataagggcattctcccctcagttgaagatcatcgaaagttggagcaataaactctctcttcaacaaatctatcttttatcttttatcgccgcaatggcgggatctaagaagagaagaattaaacaagataagtccctcaaaaagaatgacgccgtggtggccattatgaaagacctgctcgactccgtgaagtccttcgaaaattacattaaagcgttctttggggaggggaaggaaactaacagggatgagtccttctatggcgactttgtcctcgcgtacgacatcctgctgaaggtcgaccacatttacgacgcgatccgcaactacgtgacacagaagccgtactccaaagacaagttcaagctgtacttccagaacccgcaatttatggggggctgggacaaggataaagagacagactaccgcgcgacaattctccgctatggctccaaatactatctggccatcatggacaagaagtacgcgaagtgcctgcagaagatcgacaaagacgacgtcaatggcaactatgaaaagatcaactacaagctgctgccgggcccgaacaagatgctcccgaaggtgttcttcagcaagaagtggatggcctactacaatccaagcgaggatattcagaaaatctataaaaacgggaccttcaagaagggggacatgtttaacctcaacgactgccacaagctcattgatttcttcaaggatagcatttcccgctacccgaaatggtccaatgcgtacgattttaacttctccgagacagaaaagtacaaagacatcgcgggcttttacagggaggtggaggagcaagggtataaagtttcttttgaatccgcgagcaagaaggaagtcgacaagctcgtcgaggagggcaagctctacatgttccaaatttataacaaggacttttccgacaagagccatgggaccccaaacctccacaccatgtacttcaaactgctctttgacgagaacaaccacgggcaaatcaggctgagcggcggcgccgaattattcatgcgcagggcctccctcaagaaggaagagctggtcgtccatccagccaattccccgatcgcgaacaagaacccggacaatccgaaaaagaccaccaccctgtcctacgacgtctacaaggacaaacgcttcagcgaagaccagtacgaattacacatcccaattgcgattaataagtgcccaaagaatatcttcaaaattaatacagaggtcagggtgctgctcaaacacgacgacaatccgtatgtcatcggcattgacaggggcgagcgcaatctgctctatatcgtggtcgtggatgggaagggcaatattgtggagcagtactccctgaacgagattatcaacaacttcaatgggattaggattaagaccgactatcacagcctgctcgacaagaaagaaaaagagaggtttgaggcccgccaaaactggacctccattgagaatatcaaagaattaaaggccggctatatttcccaagtcgtccacaagatctgcgagctggtggagaaatatgacgccgtgattgcgctcgaagacttaaattctgggttcaagaactcccgcgtgaaggtggaaaaacaggtgtatcagaaattcgagaaaatgctgatcgacaaactcaattatatggtggataagaagtccaacccgtgtgccacagggggcgcgctgaagggctatcagatcaccaacaagttcgagagcttcaagagcatgagcacccagaacgggtttattttctacatcccggcgtggctcacctccaagattgacccgagcaccggcttcgtgaacctcctgaagacaaagtatacctccattgccgacagcaagaagtttatctcctccttcgaccgcattatgtatgtgccggaggaggacctcttcgagttcgccctcgactacaaaaacttcagccgcacagatgcggattacatcaagaagtggaagctgtactcctacgggaacaggatccgcatcttcaggaatccaaaaaaaaataacgtctttgactgggaggaagtgtgcctgacatccgcctacaaggaactgttcaataaatacggcatcaattaccagcagggcgacattcgcgccctcctctgtgagcagtccgacaaagcgttttactccagcttcatggccctcatgtccctgatgctccaaatgaggaatagcatcacagggcgcaccgacgtcgacttcctcatcagcccggtgaagaactccgacgggatcttttacgactcccgcaactatgaggcgcaagagaatgcgatcctcccgaagaacgccgatgcgaacggggcctataatatcgccaggaaagtgctctgggccatcgggcagttcaaaaaggcggaggatgagaagctcgacaaggtgaaaattgccatttccaacaaggagtggctggagtacgcgcagacctccgtgaagcacggctcctctggcagctccggctctagcggctcctctggcagctccggctccaagctggagaagtttacaaactgttacagcctctccaaaaccctcaggtttaaagcgatcccggtgggcaagacccaggagaacatcgacaacaagaggctcctggtggaagacgagaagcgcgccgaagactacaagggcgtgaagaagctgctcgataggtactacctcagctttattaacgacgtgctgcacagcatcaaactcaagaatctcaacaactacatctccctcttccgcaaaaagacccgcaccgagaaggagaacaaggagctggagaacctggagatcaacctccgcaaggaaatcgccaaagcgttcaagggcaatgaagggtacaagagcctcttcaagaaagacatcatcgaaactatcctcccagagtttctcgatgacaaggacgagatcgcgctggtgaactcctttaacgggttcacaaccgcgtttaccggcttctttgataacagggaaaatatgttctccgaggaggccaagtccaccagcatcgccttcaggtgtatcaacgagaacctcacccgctacatttccaatatggacattttcgagaaggtggatgcgatcttcgataagcacgaggtgcaggagatcaaagagaagattctcaattccgattatgacgtcgaggatttcttcgaaggggagttctttaattttgtgctcacacaagagggcattgacgtgtacaacgcgattatcgggggcttcgtcacagagtccggggagaagattaaggggctgaatgagtacatcaatctgtacaatcagaagaccaagcagaaactgccgaaattcaagccgctctacaagcaagtcctgtccgatagggaaagcctctccttctacggcgagggatccagcggcgagaaccagaccacccagaagggacagaagaacagccgcgagagaatgaagcggatcgaagagggcatcaaagagctgggcagccagatcctgaaagaacaccccgtggaaaacacccagctgcagaacgagaagctgtacctgtactacctgcagaatgggcgggatatgtacgtggaccaggaactggacatcaaccggctgtccgactacgatgtggaccatatcgtgcctcagagctttctgaaggacgactccatcgacaacaaggtgctgaccagaagcgacaagaaccggggcaagagcgacaacgtgccctccgaagaggtcgtgaagaagatgaagaactactggcggcagctgctgaacgccaagctgattacccagagaaagttcgacaatctgaccaaggccgagagaggcggcctgagcggctataccagcgacgaggaggtgctggaagtcttccgcaacacactgaataagaatagcgagattttctcctccatcaagaagctcgagaagctctttaagaactttgacgagtacagctccgccgggattttcgtgaagaacgggccggcgatcagcaccatctccaaggacatctttggcgagtggaacgtcatcagggacaagtggaacgccgagtacgacgacatccacctgaagaagaaggcggtggtgaccgagaagtatgaggacgatcgcaggaagtccttcaaaaaaatcggctccttcagcctcgaacagctccaggagtatgccgatgcggatctgtccgtcgtcgagaagctgaaggaaatcatcattcagaaggtcgacgagatctataaagtgtacgggtccagcgagaagctgttcgacgccgactttgtgctcgagggatctaagaagagaagaattaaacaagattgatagaagggctctctgtcatgatttcatactttcattattgagctctgtaattacaattatgaccatgagaacatctcttattgtgtggccttttaattgctgatgttagtactgaaccaaagcttatcgtgatgatgtaaaagcaataagtacttgtttgtagcttctttgtgtctccctttgggcttaatacatctgtttagtgttgtggctttggcatagacttctcttggtaataatgccttgcaatgcaaaatttcaattatcaaattctattatgttctcaccttatggtaacagcttaccctgtggaagatgagattcttgagttgagtcattgccaatttttggcattagcttttgaattagtgaattttgacaaaaattaccgtgacactgattttgttgaagctcttaagtgtagtttttacaaaatttcagtggctcgttgtgattatgtcaaactcacggcgaatgtagttcttacagaatttcagtggctcaaggatttaacgcgtgtatgcggccgcaaactatttaaatgcaggcgataaaaatgttttaaacgatatatattataaaaaaaaacgtttcaaaaataaatacaaaaatgtttttaaatatatataatttaactcattaaagaaaataaaaatgcaagtgcggtgacaagacaagctaaaagttgcaaaagaaatggcagggctataaggctcacctactcctggatttaccaaattttggttcgtccctatactcgaaaaataaaacaaaataaatttcagtatcttcgtttttgtatgctttgactgtgaggcgaggccaactttcttcttctgtctgagatgaattttgtttgcctcctgtgaaggatgtatcattcaaagtgaatgttttgcaactgccagtagtcccacatcgaccaaatattcttattacagtgtgtttatatagcacctggagaaggaatgggttgtttcaaagattaaataatttctactaagtgtagatcaagggactcaacatcaaaggattaatttctactaagtgtagatcaagggactcaacatcaaaggattaatttctactaagtgtagatcaagggactcaacatcaaaggattaatttctactaagtgtagatttttttttgcggccgcaacagagaaactagacctgcaggaaggcgccggcgctctcttaaggtagc

SEQ ID NO: 772 - DNA, 15999 bp, synthetic construct
  source 1..15999: mol_type = other DNA
aaggatccctgaaagcgacgttggatgttaacatctacaaattgccttttcttatcgaccatgtacgtaagcgcttacgtttttggtggacccttgaggaaactggtagctgttgtgggcctgtggactcaagatggatcattaatttccaccttcacctacgatggggggcatcgcaccggtgagtaatattgtacggctaagagcgaatttggcctgtagacctcaattgcgagctttctaatttcaaactattcgggcctaacttttggtgtgatgatgctgactggcaggatatataccgttgtaatttgagctcgtgtgaataagtcgctgtgtatgtttgtttgattgtttctgttggagtgcagcccatttcaccggacaagtcggctagattgatttagccctgatgaactgccgaggggaagccatcttgagcgcggaatgggaatggatttcgttgtacaacgacacgacagaacacccacgggaccgagcttcgaagctttaacgcttgagttaagccgcgccgcgaagcggcgtcggcttgaacgaattgttagacatcagaagaactcgtcaagaaggcgatagaaggcgatgcgctgcgaatcgggagcggcgataccgtaaagcacgaggaagcggtcagcccattcgccgccaagctcttcagcaatatcacgggtagccaacgctatgtcctgatagcggtccgccacacccagccggccacagtcgatgaatccagaaaagcggccattttccaccatgatattcggcaagcaggcatcgccatgggtcacgacgagatcctcgccgtcgggcatgcgcgccttgagcctggcgaacagttcggctggcgcgagcccctgatgctcttcgtccagatcatcctgatcgacaagaccggcttccatccgagtacgtgctcgctcgatgcgatgtttcgcttggtggtcgaatgggcaggtagccggatcaagcgtatgcagccgccgcattgcatcagccatgatggatactttctcggcaggagcaaggtgagatgacaggagatcctgccccggcacttcgcccaatagcagccagtcccttcccgcttcagtgacaacgtcgagcacagctgcgcaaggaacgcccgtcgtggccagccacgatagccgcgctgcctcgtcctgcagttcattcagggcaccggacaggtcggtcttgacaaaaagaaccgggcgcccctgcgctgacagccggaacacggcggcatcagagcagccgattgtctgttgtgcccagtcatagccgaatagcctctccacccaagcggccggagaacctgcgtgcaatccatcttgttcaatcatggctttgtttctccttcaatcattgactattgtcacgttattctgaatcgacgagaactcacatcaatctcaacaagcatctctgctcgcgaaattggtgttgtctcattaaaacgtgaccgtcaaagtctattcactaggacccaaatctctccaggtcccgcaagctagcttcgccgcccacgtttctctttcttctcatattcaattgtcaaaaaacagacctcatgaccaaaatcccttaacgtgagttttcgttccactgagcgtcagaccccgtagaaaagatcaaaggatcttcttgagatcctttttttctgcgcgtaatctgctgcttgcaaacaaaaaaaccaccgctaccagcggtggtttgtttgccggatcaagagctaccaactttttttccgaaggtaactggcttcagcagagcgcagataccaaatactgtccttctagtgtagccgtagttaggccaccacttcaagaactctgtagcaccgcctacatacctcgctctgctaatcctgttaccagtggctgctgccagtggcgataagtcgtgtcttaccgggttggactcaagacgatagttaccggataaggcgcagcggtcgggctgaacggggggttcgtgcacacagcccagcttggagcgaacgacctacaccgaactgagatacctacagcgtgagctatgagaaagcgccacgcttcccgaagggagaaaggcggacaggtatccggtaagcggcagggtcggaacaggagagcgcacgagggagcttccagggggaaacgcctggtatctttatagtcctgtcgggtttcgccacctctgacttgagcgtcgatttttgtgatgctcgtcaggggggcggagcctatggaaaaacgccagcaacgcggcctttttacggttcctggccttttgctggccttttgctcacatgttctttcctgcgttatcccctgattctgtggataaccgtattaccgcctttgagtgagctgataccgctcgccgcagccgaacgaccgagcgcagcgagtcagtgagcgaggaagcggaagagcgcctgatgcggtattttctccttacgcatctgtgcggtatttcacaccgcatatggtgcactctcagtacaatctgctctgatgccgcatagttaagccagtatacaggctctccttcacgatcaacgatcggcatggggccttcgtgcttgttgagtaatgttatcgctcccatcagagcacgcttggtactccgggaatcggatggtctgtcgatcatccaaaaaacgctcatgttttcaacctattaggtctgtggtcagctgaccacagaccatcctgctccatactcgctaattctagccaaaccgcaacgtcccctgcccgctagccttcaagagcgccattatcatcgggccaagtgaaaacttcccgagctcgctccgccgtgtcagatctcggagatagcccccgggcgaattgatgaagttcgctcgctccaaaatgcacgccatcgctgctgccgcattctccggtcccattgcctcacacgcgtcttggtaagccgacgggctgacccccagcatagaccgaaccaccaccgcagccgacatgaggtcacgccagctagcaaccgcaccgctcggcccataattgccaatggtcgggcatgctttcaggatcatcccgagggggaacgcttttatcggctcgctccttgcccggtctatttcactcggcttagcgccctgctccttttcagagcgaggttcaagttcattaacggattcgggttttgaattctgtatgtgctgctcgctctgggcagcattggtgctattattttctgaattgtctctaatttccaaccggttgattatctcttcctggagcatccacatctcttcgagaattgactctacatcagcaagcgtcggggcgcgtggaattctacccacaagttccacatagacttcctcgacagcttgccagtcgccctccgctccctcttccatagctgccgtaattagcttccgaacgtcccgtcggcaaatcgtcagactttctttggccatcctgaatgctgctcgatcggccatcacttgctgtgccatcatcgctagctcttcggaccgcgcgagaagcggagacaaatcgaagccaaacgcgcgctcgatctgaccagcgccatccttacgagcgtaacgctttccgttggcgctatccttccggacgatcaagcctgactccacgagcatggcgatgtgcctacgcaaagtcgcgccagccatcccatgcgcccgaagggcaagctgagcattcgacgggaagacgatcagctgtgcctcctgacgcaactccgtttccgggtgaaagctcaatagcgcatcaaggacggcaagactgttggactggattccaagtagttccatggccgcggacgcatctctaaagaccttccacttgtccgctgtcttgccttgtttgatatcggccagcgccgtctggcgccgcacaagcgcaagcgtcattggccgccgcccgaatggcgtcgttacacttcctgtctgcatcatctttcacctttcagcaggcaaaggaaatcagctcaccaaaacggcgctaaaaactcttgacgaggattcgaggaaatgcgattctgttcgcgctagagagacagaagggcttccgcgacggcgacgttgagggggctcttttcttttgcggtttactctccccgtttccgttggttctcagcgtggtacgcttgatacagcgctggcacatgatcgagcacgaaggtcgcaaaatcgggcgtcgccttcctgtcaatcgtgatttccagtttggccttgctctgcgtcacctgtgcaattctggtgccgtctggggtggccatgacctcgggaagtccacgcgcaacccgactgggcttcagactagcgatcaccgccttgaatcgttctgccgatggcagcgcttgaacttcctccgacatagcatatttagccacgtcggccggtgaagaaactttctcaatcagctcggcaagttgttgccaactcggccgtccaacaccaggagcggcaccaatagcatcggtcagttcagaggggagggcgtcgacgagcagaagcatcttggacaaattgctcttgtcgatcgacatcgcggcgatgacaatctctcgagaaaactgcctgttcaggcgatgtgcgaagcgcgccttttcgatgaaggtaagatcttcgcgctcattgttttcctgaccctgtgctacgaccacttgctcgtccgtcagttcgcgaacgaccgctctgaccggaagtccgagttctgaaacggcgcgtagccggcggtggccgaaggcaacctgatatcggcccggctggctcggatgcggtcgcacaaggattgggacttgctgtccttgttcccggatcgaagtaaggagcccgtcaatgtcccctcgcatacgatcctgcacgaaagacggttctattgacgaggcatccaactctatcactgcctgaccttcagcgaggcgccgctcgatctcttcggcacggctaagacgatcgttttgctctcgcagtgcgttaccaatgttcgctgtgagcttcgttgccggatcgcgctccttccttgttacgccgaggagcggcatggagcggttctttgccgtcctattgtcggcgggcgacgtttcaggggcgtcagttgacacgccaaggatgtgcttccggctcatgtgggcctaccccatgcttttttgatcagtgtttcgatctcgtcgttgacggcgttcatcgcctccaaggctcgatcataggtcgagcgcgtgaacaggccacgctccacttcgaatagagtctggtttgtcaggccagcgtccgaaaccgcggtggttttaagcatcggaaaattgaggacattttcgccaaaaatcgaccgcagataacctaccatttggttctgtggtccgtcgctcggttcgaaacgggttatcagatagcgcatccaattaaacttgaacttggcgccagcattctcgatttcacgcaaaaggttcgatgtcattgccagaaactggttcatcgacatcacatccagcatctgcggatggaccgtgacaagaatggacgtcgccgcagtcaatgcggatagcgtgagatacccaagctggggagggcagtcgatgaccacgacgtcatagttatccgcgatatcttcaattacttggctgatgcgaccataaaagagcgtgtcgccctctttgcggttcatcagcgcgcgtggcgtatcgtgttcaaactccatcagctcaaggttaccaggaatcaggtggaggtcgggaatgtaagtccctcggacgactcgttcgattgccacttgctcatcatcataccttatagcgccgtagagcgtttcgttcgggccaacgtccgtttccggttggctcccaaagagtgcagaaaggctcgcttgaggatcgagatcaatggccaagactcgatatccgcgcatagcgaggtactgcgccagatgcgcggcggtggtggtcttacccgacccacctttgaaattcatcacagagataacctgaagctgctcgccgcctcgacgatgtggcaggtagcgccggttcccgcggccgacctgatccatatacttccgaatcacatggatatcttcaattgagaacattcgcctgccacccgggctcatgctaacattcaactctggcatctcagacgcggtctgccgtaaatatgactcgccaacgccgagcagcttggacgcctccgatggcccgaatgttcgaatgcccttctcggaatgcggcgggaaaaccttaagatgatgtgcttgaagttggctcgagagggcatcggcatgacgctccatcaaggccgtcaaccctacaactacaggcgctgcttttaggacagacttcgccatctcaaacccattccttgccagtggcgatatttttcgcgaaactggaaaagttccgccgctggcaattagcgccgattctgctgtttgggcaagagcttttaggttaacagaaggttaacgccctcaggtcgaaaaactccacccaactgttatttgtatttatttccaatgccttagagagattgccatttgaatatgttcatgtattgttttagtgataatcctacaatcgtaacccaaaaagaggtcgccctctgcgcgccgtcgtccaatataggcgaagtcacccttgcgactcaggcggattctaccttgtacacgtgtcgagtggaaaagtcccatgtggatcactccgttgccccgtcgctcaccgtgttggggggaaggtgcacatggctcagttctcaatggaaattatctgcctaaccggctcagttctgcgtagaaaccaacatgcaagctccaccgggtgcaaagcggcagcggcggcaggatatattcaattgtaaatggcttcatgtccgggaaatctacatggatcagcaatgagtatgatggtcaatatggagaaaaagaaagagtaattaccaattttttttcaattcaaaaatgtagatgtccgcagcgttattataaaatgaaagtacattttgataaaacgacaaattacgatccgtcgtatttataggcgaaagcaataaacaaattattctaattcggaaatctttatttcgacgtgtctacattcacgtccaaatgggggcttagatgagaaacttcacgatcgatgcggccctgccggcgcgccactagtcaacaattggccaatctttgttctaaattgctaataaacgaccatttccgtcaattctccttggttgcaacagtctacccgtcaaatgtttactaatttataagtgtgaagtttgaattatgaaagacgaaatcgtattaaaaattcacaagaataaacaactccatagattttcaaaaaaacagtcacgagaaaaaaaccacagtccgtttgtctgctcttctagtttttattatttttctattaatagttttttgttatttcgagaataaaatttgaacgatgtccgaaccacaaaagccgagccgataaatcctaagccgagcctaactttagccgtaaccatcagtcacggctcccgggctaattcatttgaaccgaatcataatcaacggtttagatcaaactcaaaacaatctaacggcaacatagacgcgtcggtgagctaaaaagagtgtgaaagccaggtcaccatagcattgtctctcccagattttttatttgggaaataatagaagaaatagaaaaaaataaaagagtgagaaaaatcgtagagctatatattcgcacatgtactcgtttcgctttccttagtgttagctgctgccgctgttgtttctcctccatttctctatctttctctctcgctgcttctcgaatcttctgtatcatcttcttcttcttcaaggtgagtctctagatccgttcgcttgattttgctgctcgttagtcgttattgttgattctctatgccgatttcgctagatctgtttagcatgcgttgtggttttatgagaaaatctttgttttgggggttgcttgttatgtgattcgatccgtgcttgttggatcgatctgagctaattcttaaggtttatgtgttagatctatggagtttgaggattcttctcgcttctgtcgatctctcgctgttatttttgtttttttcagtgaagtgaagttgtttagttcgaaatgacttcgtgtatgctcgattgatctggttttaatcttcgatctgttaggtgttgatgtttacaagtgaattctagtgttttctcgttgagatctgtgaagtttgaacctagttttctcaataatcaacatatgaagcgatgtttgagtttcaataaacgctgctaatcttcgaaactaagttgtgatctgattcgtgtttacttcatgagcttatccaattcatttcggtttcattttactttttttttagtgaaccatggcgcaagttagcagaatctgcaatggtgtgcagaacccatctcttatctccaatctctcgaaatccagtcaacgcaaatctcccttatcggtttctctgaagacgcagcagcatccacgagcttatccgatttcgtcgtcgtggggattgaagaagagtgggatgacgttaattggctctgagcttcgtcctcttaaggtcatgtcttctgtttccacggcgtgcatgggggaagcggtgatcgccgaagtatcgactcaactatcagaggtagttggcgtcatcgagcgccatctcgaaccgacgttgctggccgtacatttgtacggctccgcagtggatggcggcctgaagccacacagtgatattgatttgctggttacggtgaccgtaaggcttgatgaaacaacgcggcgagctttgatcaacgaccttttggaaacttcggcttcccctggagagagcgagattctccgcgctgtagaagtcaccattgttgtgcacgacgacatcattccgtggcgttatccagctaagcgcgaactgcaatttggagaatggcagcgcaatgacattcttgcaggtatcttcgagccagccacgatcgacattgatctggctatcttgctgacaaaagcaagagaacatagcgttgccttggtaggtccagcggcggaggaactctttgatccggttcctgaacaggatctatttgaggcgctaaatgaaaccttaacgctatggaactcgccgcccgactgggctggcgatgagcgaaatgtagtgcttacgttgtcccgcatttggtacagcgcagtaaccggcaaaatcgcgccgaaggatgtcgctgccgactgggcaatggagcgcctgccggcccagtatcagcccgtcatacttgaagctagacaggcttatcttggacaagaagaagatcgcttggcctcgcgcgcagatcagttggaagaatttgtccactacgtgaaaggcgagatcaccaaggtagtcggcaaataaggatcaattcccgatcgttcaaacatttggcaataaagtttcttaagattgaatcctgttgccggtcttgcgatgattatcatataatttctgttgaattacgttaagcatgtaataattaacatgtaatgcatgacgttatttatgagatgggtttttatgattagagtcccgcaattatacatttaatacgcgatagaaaacaaaatatagcgcgcaaactaggataaattatcgcgcgcggtgtcatctatgttactagatcacgcgtgtatgcaatatcctgcagggtattaattaattatgccctaagacatcctggaccaatatgctgaagattatgctacctacaccaggataggacttgaagcacttaaccttgaagattggttcgaagaaccagaacccgatccacctaaccctgtggaccgccagaggatagaggacatcctggacctactgaacgtcagcaatgacgactgaaagattcccaggacaccggcggaagtggtggacccagtctaggtgcgatgcttagtcgcgcacgatgactatgtcggaaggcatctttgctttcggcaaactttagtaatactttaaggaaagtattgtacaagttaggtgcagagacaataatgcacccagctttagctttgtttatggaattattgtgtcggttgcattattggatgcctgcgtgcaccctaagcaatcaacggagaaacaaagataaaaatcaattactcacatgaaagagtattgatcacgagtcactatggagcgacaatctccagacaggatgtcagcatcttatcttcctttgaagaaagcatcatcaataacgatgtaatggtggggacatccactaagttattgctctgcaaacagctcaaaaagctactggccgacaatcataattgctcggcatgtccaggtggggcctccactagcaataatacaagctttacagcttgcagtgactcatcctccaataatggagaaaaagacgtcagcagtgacgaacaagggtcgaaagacttgcctatataagggcattctcccctcagttgaagatcatcgaaagttggagcaataaactctctcttcaacaaatctatcttttatcttttatcgccgcaatggcgggatctaagaagagaagaattaaacaagattccgacaaagcgttttactccagcttcatggccctcatgtccctgatgctccaaatgaggaatagcatcacagggcgcaccgacgtcgacttcctcatcagcccggtgaagaactccgacgggatcttttacgactcccgcaactatgaggcgcaagagaatgcgatcctcccgaagaacgccgatgcgaacggggcctataatatcgccaggaaagtgctctgggccatcgggcagttcaaaaaggcggaggatgagaagctcgacaaggtgaaaattgccatttccaacaaggagtggctggagtacgcgcagacctccgtgaagcacggctcctctggcagctccggctctagcggctcctctggcagctccggctccaagctggagaagtttacaaactgttacagcctctccaaaaccctcaggtttaaagcgatcccggtgggcaagacccaggagaacatcgacaacaagaggctcctggtggaagacgagaagcgcgccgaagactacaagggcgtgaagaagctgctcgataggtactacctcagctttattaacgacgtgctgcacagcatcaaactcaagaatctcaacaactacatctccctcttccgcaaaaagacccgcaccgagaaggagaacaaggagctggagaacctggagatcaacctccgcaaggaaatcgccaaagcgttcaagggcaatgaagggtacaagagcctcttcaagaaagacatcatcgaaactatcctcccagagtttctcgatgacaaggacgagatcgcgctggtgaactcctttaacgggttcacaaccgcgtttaccggcttctttgataacagggaaaatatgttctccgaggaggccaagtccaccagcatcgccttcaggtgtatcaacgagaacctcacccgctacatttccaatatggacattttcgagaaggtggatgcgatcttcgataagcacgaggtgcaggagatcaaagagaagattctcaattccgattatgacgtcgaggatttcttcgaaggggagttctttaattttgtgctcacacaagagggcattgacgtgtacaacgcgattatcgggggcttcgtcacagagtccggggagaagattaaggggctgaatgagtacatcaatctgtacaatcagaagaccaagcagaaactgccgaaattcaagccgctctacaagcaagtcctgtccgatagggaaagcctctccttctacggcgagggatccagcggcgagaaccagaccacccagaagggacagaagaacagccgcgagagaatgaagcggatcgaagagggcatcaaagagctgggcagccagatcctgaaagaacaccccgtggaaaacacccagctgcagaacgagaagctgtacctgtactacctgcagaatgggcgggatatgtacgtggaccaggaactggacatcaaccggctgtccgactacgatgtggaccatatcgtgcctcagagctttctgaaggacgactccatcgacaacaaggtgctgaccagaagcgacaagaaccggggcaagagcgacaacgtgccctccgaagaggtcgtgaagaagatgaagaactactggcggcagctgctgaacgccaagctgattacccagagaaagttcgacaatctgaccaaggccgagagaggcggcctgagcggctataccagcgacgaggaggtgctggaagtcttccgcaacacactgaataagaatagcgagattttctcctccatcaagaagctcgagaagctctttaagaactttgacgagtacagctccgccgggattttcgtgaagaacgggccggcgatcagcaccatctccaaggacatctttggcgagtggaacgtcatcagggacaagtggaacgccgagtacgacgacatccacctgaagaagaaggcggtggtgaccgagaagtatgaggacgatcgcaggaagtccttcaaaaaaatcggctccttcagcctcgaacagctccaggagtatgccgatgcggatctgtccgtcgtcgagaagctgaaggaaatcatcattcagaaggtcgacgagatctataaagtgtacgggtccagcgagaagctgttcgacgccgactttgtgctcgagaagtccctcaaaaagaatgacgccgtggtggccattatgaaagacctgctcgactccgtgaagtccttcgaaaattacattaaagcgttctttggggaggggaaggaaactaacagggatgagtccttctatggcgactttgtcctcgcgtacgacatcctgctgaaggtcgaccacatttacgacgcgatccgcaactacgtgacacagaagccgtactccaaagacaagttcaagctgtacttccagaacccgcaatttatggggggctgggacaaggataaagagacagactaccgcgcgacaattctccgctatggctccaaatactatctggccatcatggacaagaagtacgcgaagtgcctgcagaagatcgacaaagacgacgtcaatggcaactatgaaaagatcaactacaagctgctgccgggcccgaacaagatgctcccgaaggtgttcttcagcaagaagtggatggcctactacaatccaagcgaggatattcagaaaatctataaaaacgggaccttcaagaagggggacatgtttaacctcaacgactgccacaagctcattgatttcttcaaggatagcatttcccgctacccgaaatggtccaatgcgtacgattttaacttctccgagacagaaaagtacaaagacatcgcgggcttttacagggaggtggaggagcaagggtataaagtttcttttgaatccgcgagcaagaaggaagtcgacaagctcgtcgaggagggcaagctctacatgttccaaatttataacaaggacttttccgacaagagccatgggaccccaaacctccacaccatgtacttcaaactgctctttgacgagaacaaccacgggcaaatcaggctgagcggcggcgccgaattattcatgcgcagggcctccctcaagaaggaagagctggtcgtccatccagccaattccccgatcgcgaacaagaacccggacaatccgaaaaagaccaccaccctgtcctacgacgtctacaaggacaaacgcttcagcgaagaccagtacgaattacacatcccaattgcgattaataagtgcccaaagaatatcttcaaaattaatacagaggtcagggtgctgctcaaacacgacgacaatccgtatgtcatcggcattgacaggggcgagcgcaatctgctctatatcgtggtcgtggatgggaagggcaatattgtggagcagtactccctgaacgagattatcaacaacttcaatgggattaggattaagaccgactatcacagcctgctcgacaagaaagaaaaagagaggtttgaggcccgccaaaactggacctccattgagaatatcaaagaattaaaggccggctatatttcccaagtcgtccacaagatctgcgagctggtggagaaatatgacgccgtgattgcgctcgaagacttaaattctgggttcaagaactcccgcgtgaaggtggaaaaacaggtgtatcagaaattcgagaaaatgctgatcgacaaactcaattatatggtggataagaagtccaacccgtgtgccacagggggcgcgctgaagggctatcagatcaccaacaagttcgagagcttcaagagcatgagcacccagaacgggtttattttctacatcccggcgtggctcacctccaagattgacccgagcaccggcttcgtgaacctcctgaagacaaagtatacctccattgccgacagcaagaagtttatctcctccttcgaccgcattatgtatgtgccggaggaggacctcttcgagttcgccctcgactacaaaaacttcagccgcacagatgcggattacatcaagaagtggaagctgtactcctacgggaacaggatccgcatcttcaggaatccaaaaaaaaataacgtctttgactgggaggaagtgtgcctgacatccgcctacaaggaactgttcaataaatacggcatcaattaccagcagggcgacattcgcgccctcctctgtgagcagggatctaagaagagaagaattaaacaagattgatagaagggctctctgtcatgatttcatactttcattattgagctctgtaattacaattatgaccatgagaacatctcttattgtgtggccttttaattgctgatgttagtactgaaccaaagcttatcgtgatgatgtaaaagcaataagtacttgtttgtagcttctttgtgtctccctttgggcttaatacatctgtttagtgttgtggctttggcatagacttctcttggtaataatgccttgcaatgcaaaatttcaattatcaaattctattatgttctcaccttatggtaacagcttaccctgtggaagatgagattcttgagttgagtcattgccaatttttggcattagcttttgaattagtgaattttgacaaaaattaccgtgacactgattttgttgaagctcttaagtgtagtttttacaaaatttcagtggctcgttgtgattatgtcaaactcacggcgaatgtagttcttacagaatttcagtggctcaaggatttaacgcgtgtatgcggccgcaaactatttaaatgcaggcgataaaaatgttttaaacgatatatattataaaaaaaaacgtttcaaaaataaatacaaaaatgtttttaaatatatataatttaactcattaaagaaaataaaaatgcaagtgcggtgacaagacaagctaaaagttgcaaaagaaatggcagggctataaggctcacctactcctggatttaccaaattttggttcgtccctatactcgaaaaataaaacaaaataaatttcagtatcttcgtttttgtatgctttgactgtgaggcgaggccaactttcttcttctgtctgagatgaattttgtttgcctcctgtgaaggatgtatcattcaaagtgaatgttttgcaactgccagtagtcccacatcgaccaaatattcttattacagtgtgtttatatagcacctggagaaggaatgggttgtttcaaagattaaataatttctactaagtgtagatcaagggactcaacatcaaaggattaatttctactaagtgtagatcaagggactcaacatcaaaggattaatttctactaagtgtagatcaagggactcaacatcaaaggattaatttctactaagtgtagatttttttttgcggccgcaacagagaaactagacctgcaggaaggcgccggcgctctcttaaggtagc

SEQ ID NO: 773 - DNA, 15959 bp, synthetic construct
  source 1..15959: mol_type = other DNA
aaggatccctgaaagcgacgttggatgttaacatctacaaattgccttttcttatcgaccatgtacgtaagcgcttacgtttttggtggacccttgaggaaactggtagctgttgtgggcctgtggactcaagatggatcattaatttccaccttcacctacgatggggggcatcgcaccggtgagtaatattgtacggctaagagcgaatttggcctgtagacctcaattgcgagctttctaatttcaaactattcgggcctaacttttggtgtgatgatgctgactggcaggatatataccgttgtaatttgagctcgtgtgaataagtcgctgtgtatgtttgtttgattgtttctgttggagtgcagcccatttcaccggacaagtcggctagattgatttagccctgatgaactgccgaggggaagccatcttgagcgcggaatgggaatggatttcgttgtacaacgacacgacagaacacccacgggaccgagcttcgaagctttaacgcttgagttaagccgcgccgcgaagcggcgtcggcttgaacgaattgttagacatcagaagaactcgtcaagaaggcgatagaaggcgatgcgctgcgaatcgggagcggcgataccgtaaagcacgaggaagcggtcagcccattcgccgccaagctcttcagcaatatcacgggtagccaacgctatgtcctgatagcggtccgccacacccagccggccacagtcgatgaatccagaaaagcggccattttccaccatgatattcggcaagcaggcatcgccatgggtcacgacgagatcctcgccgtcgggcatgcgcgccttgagcctggcgaacagttcggctggcgcgagcccctgatgctcttcgtccagatcatcctgatcgacaagaccggcttccatccgagtacgtgctcgctcgatgcgatgtttcgcttggtggtcgaatgggcaggtagccggatcaagcgtatgcagccgccgcattgcatcagccatgatggatactttctcggcaggagcaaggtgagatgacaggagatcctgccccggcacttcgcccaatagcagccagtcccttcccgcttcagtgacaacgtcgagcacagctgcgcaaggaacgcccgtcgtggccagccacgatagccgcgctgcctcgtcctgcagttcattcagggcaccggacaggtcggtcttgacaaaaagaaccgggcgcccctgcgctgacagccggaacacggcggcatcagagcagccgattgtctgttgtgcccagtcatagccgaatagcctctccacccaagcggccggagaacctgcgtgcaatccatcttgttcaatcatggctttgtttctccttcaatcattgactattgtcacgttattctgaatcgacgagaactcacatcaatctcaacaagcatctctgctcgcgaaattggtgttgtctcattaaaacgtgaccgtcaaagtctattcactaggacccaaatctctccaggtcccgcaagctagcttcgccgcccacgtttctctttcttctcatattcaattgtcaaaaaacagacctcatgaccaaaatcccttaacgtgagttttcgttccactgagcgtcagaccccgtagaaaagatcaaaggatcttcttgagatcctttttttctgcgcgtaatctgctgcttgcaaacaaaaaaaccaccgctaccagcggtggtttgtttgccggatcaagagctaccaactttttttccgaaggtaactggcttcagcagagcgcagataccaaatactgtccttctagtgtagccgtagttaggccaccacttcaagaactctgtagcaccgcctacatacctcgctctgctaatcctgttaccagtggctgctgccagtggcgataagtcgtgtcttaccgggttggactcaagacgatagttaccggataaggcgcagcggtcgggctgaacggggggttcgtgcacacagcccagcttggagcgaacgacctacaccgaactgagatacctacagcgtgagctatgagaaagcgccacgcttcccgaagggagaaaggcggacaggtatccggtaagcggcagggtcggaacaggagagcgcacgagggagcttccagggggaaacgcctggtatctttatagtcctgtcgggtttcgccacctctgacttgagcgtcgatttttgtgatgctcgtcaggggggcggagcctatggaaaaacgccagcaacgcggcctttttacggttcctggccttttgctggccttttgctcacatgttctttcctgcgttatcccctgattctgtggataaccgtattaccgcctttgagtgagctgataccgctcgccgcagccgaacgaccgagcgcagcgagtcagtgagcgaggaagcggaagagcgcctgatgcggtattttctccttacgcatctgtgcggtatttcacaccgcatatggtgcactctcagtacaatctgctctgatgccgcatagttaagccagtatacaggctctccttcacgatcaacgatcggcatggggccttcgtgcttgttgagtaatgttatcgctcccatcagagcacgcttggtactccgggaatcggatggtctgtcgatcatccaaaaaacgctcatgttttcaacctattaggtctgtggtcagctgaccacagaccatcctgctccatactcgctaattctagccaaaccgcaacgtcccctgcccgctagccttcaagagcgccattatcatcgggccaagtgaaaacttcccgagctcgctccgccgtgtcagatctcggagatagcccccgggcgaattgatgaagttcgctcgctccaaaatgcacgccatcgctgctgccgcattctccggtcccattgcctcacacgcgtcttggtaagccgacgggctgacccccagcatagaccgaaccaccaccgcagccgacatgaggtcacgccagctagcaaccgcaccgctcggcccataattgccaatggtcgggcatgctttcaggatcatcccgagggggaacgcttttatcggctcgctccttgcccggtctatttcactcggcttagcgccctgctccttttcagagcgaggttcaagttcattaacggattcgggttttgaattctgtatgtgctgctcgctctgggcagcattggtgctattattttctgaattgtctctaatttccaaccggttgattatctcttcctggagcatccacatctcttcgagaattgactctacatcagcaagcgtcggggcgcgtggaattctacccacaagttccacatagacttcctcgacagcttgccagtcgccctccgctccctcttccatagctgccgtaattagcttccgaacgtcccgtcggcaaatcgtcagactttctttggccatcctgaatgctgctcgatcggccatcacttgctgtgccatcatcgctagctcttcggaccgcgcgagaagcggagacaaatcgaagccaaacgcgcgctcgatctgaccagcgccatccttacgagcgtaacgctttccgttggcgctatccttccggacgatcaagcctgactccacgagcatggcgatgtgcctacgcaaagtcgcgccagccatcccatgcgcccgaagggcaagctgagcattcgacgggaagacgatcagctgtgcctcctgacgcaactccgtttccgggtgaaagctcaatagcgcatcaaggacggcaagactgttggactggattccaagtagttccatggccgcggacgcatctctaaagaccttccacttgtccgctgtcttgccttgtttgatatcggccagcgccgtctggcgccgcacaagcgcaagcgtcattggccgccgcccgaatggcgtcgttacacttcctgtctgcatcatctttcacctttcagcaggcaaaggaaatcagctcaccaaaacggcgctaaaaactcttgacgaggattcgaggaaatgcgattctgttcgcgctagagagacagaagggcttccgcgacggcgacgttgagggggctcttttcttttgcggtttactctccccgtttccgttggttctcagcgtggtacgcttgatacagcgctggcacatgatcgagcacgaaggtcgcaaaatcgggcgtcgccttcctgtcaatcgtgatttccagtttggccttgctctgcgtcacctgtgcaattctggtgccgtctggggtggccatgacctcgggaagtccacgcgcaacccgactgggcttcagactagcgatcaccgccttgaatcgttctgccgatggcagcgcttgaacttcctccgacatagcatatttagccacgtcggccggtgaagaaactttctcaatcagctcggcaagttgttgccaactcggccgtccaacaccaggagcggcaccaatagcatcggtcagttcagaggggagggcgtcgacgagcagaagcatcttggacaaattgctcttgtcgatcgacatcgcggcgatgacaatctctcgagaaaactgcctgttcaggcgatgtgcgaagcgcgccttttcgatgaaggtaagatcttcgcgctcattgttttcctgaccctgtgctacgaccacttgctcgtccgtcagttcgcgaacgaccgctctgaccggaagtccgagttctgaaacggcgcgtagccggcggtggccgaaggcaacctgatatcggcccggctggctcggatgcggtcgcacaaggattgggacttgctgtccttgttcccggatcgaagtaaggagcccgtcaatgtcccctcgcatacgatcctgcacgaaagacggttctattgacgaggcatccaactctatcactgcctgaccttcagcgaggcgccgctcgatctcttcggcacggctaagacgatcgttttgctctcgcagtgcgttaccaatgttcgctgtgagcttcgttgccggatcgcgctccttccttgttacgccgaggagcggcatggagcggttctttgccgtcctattgtcggcgggcgacgtttcaggggcgtcagttgacacgccaaggatgtgcttccggctcatgtgggcctaccccatgcttttttgatcagtgtttcgatctcgtcgttgacggcgttcatcgcctccaaggctcgatcataggtcgagcgcgtgaacaggccacgctccacttcgaatagagtctggtttgtcaggccagcgtccgaaaccgcggtggttttaagcatcggaaaattgaggacattttcgccaaaaatcgaccgcagataacctaccatttggttctgtggtccgtcgctcggttcgaaacgggttatcagatagcgcatccaattaaacttgaacttggcgccagcattctcgatttcacgcaaaaggttcgatgtcattgccagaaactggttcatcgacatcacatccagcatctgcggatggaccgtgacaagaatggacgtcgccgcagtcaatgcggatagcgtgagatacccaagctggggagggcagtcgatgaccacgacgtcatagttatccgcgatatcttcaattacttggctgatgcgaccataaaagagcgtgtcgccctctttgcggttcatcagcgcgcgtggcgtatcgtgttcaaactccatcagctcaaggttaccaggaatcaggtggaggtcgggaatgtaagtccctcggacgactcgttcgattgccacttgctcatcatcataccttatagcgccgtagagcgtttcgttcgggccaacgtccgtttccggttggctcccaaagagtgcagaaaggctcgcttgaggatcgagatcaatggccaagactcgatatccgcgcatagcgaggtactgcgccagatgcgcggcggtggtggtcttacccgacccacctttgaaattcatcacagagataacctgaagctgctcgccgcctcgacgatgtggcaggtagcgccggttcccgcggccgacctgatccatatacttccgaatcacatggatatcttcaattgagaacattcgcctgccacccgggctcatgctaacattcaactctggcatctcagacgcggtctgccgtaaatatgactcgccaacgccgagcagcttggacgcctccgatggcccgaatgttcgaatgcccttctcggaatgcggcgggaaaaccttaagatgatgtgcttgaagttggctcgagagggcatcggcatgacgctccatcaaggccgtcaaccctacaactacaggcgctgcttttaggacagacttcgccatctcaaacccattccttgccagtggcgatatttttcgcgaaactggaaaagttccgccgctggcaattagcgccgattctgctgtttgggcaagagcttttaggttaacagaaggttaacgccctcaggtcgaaaaactccacccaactgttatttgtatttatttccaatgccttagagagattgccatttgaatatgttcatgtattgttttagtgataatcctacaatcgtaacccaaaaagaggtcgccctctgcgcgccgtcgtccaatataggcgaagtcacccttgcgactcaggcggattctaccttgtacacgtgtcgagtggaaaagtcccatgtggatcactccgttgccccgtcgctcaccgtgttggggggaaggtgcacatggctcagttctcaatggaaattatctgcctaaccggctcagttctgcgtagaaaccaacatgcaagctccaccgggtgcaaagcggcagcggcggcaggatatattcaattgtaaatggcttcatgtccgggaaatctacatggatcagcaatgagtatgatggtcaatatggagaaaaagaaagagtaattaccaattttttttcaattcaaaaatgtagatgtccgcagcgttattataaaatgaaagtacattttgataaaacgacaaattacgatccgtcgtatttataggcgaaagcaataaacaaattattctaattcggaaatctttatttcgacgtgtctacattcacgtccaaatgggggcttagatgagaaacttcacgatcgatgcggccctgccggcgcgccactagtcaacaattggccaatctttgttctaaattgctaataaacgaccatttccgtcaattctccttggttgcaacagtctacccgtcaaatgtttactaatttataagtgtgaagtttgaattatgaaagacgaaatcgtattaaaaattcacaagaataaacaactccatagattttcaaaaaaacagtcacgagaaaaaaaccacagtccgtttgtctgctcttctagtttttattatttttctattaatagttttttgttatttcgagaataaaatttgaacgatgtccgaaccacaaaagccgagccgataaatcctaagccgagcctaactttagccgtaaccatcagtcacggctcccgggctaattcatttgaaccgaatcataatcaacggtttagatcaaactcaaaacaatctaacggcaacatagacgcgtcggtgagctaaaaagagtgtgaaagccaggtcaccatagcattgtctctcccagattttttatttgggaaataatagaagaaatagaaaaaaataaaagagtgagaaaaatcgtagagctatatattcgcacatgtactcgtttcgctttccttagtgttagctgctgccgctgttgtttctcctccatttctctatctttctctctcgctgcttctcgaatcttctgtatcatcttcttcttcttcaaggtgagtctctagatccgttcgcttgattttgctgctcgttagtcgttattgttgattctctatgccgatttcgctagatctgtttagcatgcgttgtggttttatgagaaaatctttgttttgggggttgcttgttatgtgattcgatccgtgcttgttggatcgatctgagctaattcttaaggtttatgtgttagatctatggagtttgaggattcttctcgcttctgtcgatctctcgctgttatttttgtttttttcagtgaagtgaagttgtttagttcgaaatgacttcgtgtatgctcgattgatctggttttaatcttcgatctgttaggtgttgatgtttacaagtgaattctagtgttttctcgttgagatctgtgaagtttgaacctagttttctcaataatcaacatatgaagcgatgtttgagtttcaataaacgctgctaatcttcgaaactaagttgtgatctgattcgtgtttacttcatgagcttatccaattcatttcggtttcattttactttttttttagtgaaccatggcgcaagttagcagaatctgcaatggtgtgcagaacccatctcttatctccaatctctcgaaatccagtcaacgcaaatctcccttatcggtttctctgaagacgcagcagcatccacgagcttatccgatttcgtcgtcgtggggattgaagaagagtgggatgacgttaattggctctgagcttcgtcctcttaaggtcatgtcttctgtttccacggcgtgcatgggggaagcggtgatcgccgaagtatcgactcaactatcagaggtagttggcgtcatcgagcgccatctcgaaccgacgttgctggccgtacatttgtacggctccgcagtggatggcggcctgaagccacacagtgatattgatttgctggttacggtgaccgtaaggcttgatgaaacaacgcggcgagctttgatcaacgaccttttggaaacttcggcttcccctggagagagcgagattctccgcgctgtagaagtcaccattgttgtgcacgacgacatcattccgtggcgttatccagctaagcgcgaactgcaatttggagaatggcagcgcaatgacattcttgcaggtatcttcgagccagccacgatcgacattgatctggctatcttgctgacaaaagcaagagaacatagcgttgccttggtaggtccagcggcggaggaactctttgatccggttcctgaacaggatctatttgaggcgctaaatgaaaccttaacgctatggaactcgccgcccgactgggctggcgatgagcgaaatgtagtgcttacgttgtcccgcatttggtacagcgcagtaaccggcaaaatcgcgccgaaggatgtcgctgccgactgggcaatggagcgcctgccggcccagtatcagcccgtcatacttgaagctagacaggcttatcttggacaagaagaagatcgcttggcctcgcgcgcagatcagttggaagaatttgtccactacgtgaaaggcgagatcaccaaggtagtcggcaaataaggatcaattcccgatcgttcaaacatttggcaataaagtttcttaagattgaatcctgttgccggtcttgcgatgattatcatataatttctgttgaattacgttaagcatgtaataattaacatgtaatgcatgacgttatttatgagatgggtttttatgattagagtcccgcaattatacatttaatacgcgatagaaaacaaaatatagcgcgcaaactaggataaattatcgcgcgcggtgtcatctatgttactagatcacgcgtgtatgcaatatcctgcagggtattaattaattatgccctaagacatcctggaccaatatgctgaagattatgctacctacaccaggataggacttgaagcacttaaccttgaagattggttcgaagaaccagaacccgatccacctaaccctgtggaccgccagaggatagaggacatcctggacctactgaacgtcagcaatgacgactgaaagattcccaggacaccggcggaagtggtggacccagtctaggtgcgatgcttagtcgcgcacgatgactatgtcggaaggcatctttgctttcggcaaactttagtaatactttaaggaaagtattgtacaagttaggtgcagagacaataatgcacccagctttagctttgtttatggaattattgtgtcggttgcattattggatgcctgcgtgcaccctaagcaatcaacggagaaacaaagataaaaatcaattactcacatgaaagagtattgatcacgagtcactatggagcgacaatctccagacaggatgtcagcatcttatcttcctttgaagaaagcatcatcaataacgatgtaatggtggggacatccactaagttattgctctgcaaacagctcaaaaagctactggccgacaatcataattgctcggcatgtccaggtggggcctccactagcaataatacaagctttacagcttgcagtgactcatcctccaataatggagaaaaagacgtcagcagtgacgaacaagggtcgaaagacttgcctatataagggcattctcccctcagttgaagatcatcgaaagttggagcaataaactctctcttcaacaaatctatcttttatcttttatcgccgcaagccaccatggcgggatctaagaagagaagaattaaacaagattccaagctggagaagtttacaaactgttacagcctctccaaaaccctcaggtttaaagcgatcccggtgggcaagacccaggagaacatcgacaacaagaggctcctggtggaagacgagaagcgcgccgaagactacaagggcgtgaagaagctgctcgataggtactacctcagctttattaacgacgtgctgcacagcatcaaactcaagaatctcaacaactacatctccctcttccgcaaaaagacccgcaccgagaaggagaacaaggagctggagaacctggagatcaacctccgcaaggaaatcgccaaagcgttcaagggcaatgaagggtacaagagcctcttcaagaaagacatcatcgaaactatcctcccagagtttctcgatgacaaggacgagatcgcgctggtgaactcctttaacgggttcacaaccgcgtttaccggcttctttgataacagggaaaatatgttctccgaggaggccaagtccaccagcatcgccttcaggtgtatcaacgagaacctcacccgctacatttccaatatggacattttcgagaaggtggatgcgatcttcgataagcacgaggtgcaggagatcaaagagaagattctcaattccgattatgacgtcgaggatttcttcgaaggggagttctttaattttgtgctcacacaagagggcattgacgtgtacaacgcgattatcgggggcttcgtcacagagtccggggagaagattaaggggctgaatgagtacatcaatctgtacaatcagaagaccaagcagaaactgccgaaattcaagccgctctacaagcaagtcctgtccgatagggaaagcctctccttctacggcgagggctcctctggcgaaaatcagaccacgcagaagggccaaaaaaacagccgcgagcggatgaagcggatcgaggagggcatcaaggagctggggtcgcagatcctcaaggagcacccggtggagaacacgcagctccagaacgagaagctgtacctctattacctacagaacgggcgggatatgtacgtggaccaggagctagacatcaaccgcctgtccgactacgacgtggaccatatcgtcccgcagtcgttcttgaaggacgacagcatcgacaacaaggtgctcacaagatcggataagaatcgaggcaagtccgacaacgtgccctcggaggaggtggtcaagaaaatgaaaaactactggcggcagttgctgaacgccaagctcattacgcagcggaagttcgacaacctgacgaaggctgaacgtggtgggctcagcggctataccagcgacgaggaggtgctggaagtcttccgcaacacactgaataagaatagcgagattttctcctccatcaagaagctcgagaagctctttaagaactttgacgagtacagctccgccgggattttcgtgaagaacgggccggcgatcagcaccatctccaaggacatctttggcgagtggaacgtcatcagggacaagtggaacgccgagtacgacgacatccacctgaagaagaaggcggtggtgaccgagaagtatgaggacgatcgcaggaagtccttcaaaaaaatcggctccttcagcctcgaacagctccaggagtatgccgatgcggatctgtccgtcgtcgagaagctgaaggaaatcatcattcagaaggtcgacgagatctataaagtgtacgggtccagcgagaagctgttcgacgccgactttgtgctcgagaagtccctcaaaaagaatgacgccgtggtggccattatgaaagacctgctcgactccgtgaagtccttcgaaaattacattaaagcgttctttggggaggggaaggaaactaacagggatgagtccttctatggcgactttgtcctcgcgtacgacatcctgctgaaggtcgaccacatttacgacgcgatccgcaactacgtgacacagaagccgtactccaaagacaagttcaagctgtacttccagaacccgcaatttatggggggctgggacaaggataaagagacagactaccgcgcgacaattctccgctatggctccaaatactatctggccatcatggacaagaagtacgcgaagtgcctgcagaagatcgacaaagacgacgtcaatggcaactatgaaaagatcaactacaagctgctgccgggcccgaacaagatgctcccgaaggtgttcttcagcaagaagtggatggcctactacaatccaagcgaggatattcagaaaatctataaaaacgggaccttcaagaagggggacatgtttaacctcaacgactgccacaagctcattgatttcttcaaggatagcatttcccgctacccgaaatggtccaatgcgtacgattttaacttctccgagacagaaaagtacaaagacatcgcgggcttttacagggaggtggaggagcaagggtataaagtttcttttgaatccgcgagcaagaaggaagtcgacaagctcgtcgaggagggcaagctctacatgttccaaatttataacaaggacttttccgacaagagccatgggaccccaaacctccacaccatgtacttcaaactgctctttgacgagaacaaccacgggcaaatcaggctgagcggcggcgccgaattattcatgcgcagggcctccctcaagaaggaagagctggtcgtccatccagccaattccccgatcgcgaacaagaacccggacaatccgaaaaagaccaccaccctgtcctacgacgtctacaaggacaaacgcttcagcgaagaccagtacgaattacacatcccaattgcgattaataagtgcccaaagaatatcttcaaaattaatacagaggtcagggtgctgctcaaacacgacgacaatccgtatgtcatcggcattgacaggggcgagcgcaatctgctctatatcgtggtcgtggatgggaagggcaatattgtggagcagtactccctgaacgagattatcaacaacttcaatgggattaggattaagaccgactatcacagcctgctcgacaagaaagaaaaagagaggtttgaggcccgccaaaactggacctccattgagaatatcaaagaattaaaggccggctatatttcccaagtcgtccacaagatctgcgagctggtggagaaatatgacgccgtgattgcgctcgaagacttaaattctgggttcaagaactcccgcgtgaaggtggaaaaacaggtgtatcagaaattcgagaaaatgctgatcgacaaactcaattatatggtggataagaagtccaacccgtgtgccacagggggcgcgctgaagggctatcagatcaccaacaagttcgagagcttcaagagcatgagcacccagaacgggtttattttctacatcccggcgtggctcacctccaagattgacccgagcaccggcttcgtgaacctcctgaagacaaagtatacctccattgccgacagcaagaagtttatctcctccttcgaccgcattatgtatgtgccggaggaggacctcttcgagttcgccctcgactacaaaaacttcagccgcacagatgcggattacatcaagaagtggaagctgtactcctacgggaacaggatccgcatcttcaggaatccaaaaaaaaataacgtctttgactgggaggaagtgtgcctgacatccgcctacaaggaactgttcaataaatacggcatcaattaccagcagggcgacattcgcgccctcctctgtgagcagtccgacaaagcgttttactccagcttcatggccctcatgtccctgatgctccaaatgaggaatagcatcacagggcgcaccgacgtcgacttcctcatcagcccggtgaagaactccgacgggatcttttacgactcccgcaactatgaggcgcaagagaatgcgatcctcccgaagaacgccgatgcgaacggggcctataatatcgccaggaaagtgctctgggccatcgggcagttcaaaaaggcggaggatgagaagctcgacaaggtgaaaattgccatttccaacaaggagtggctggagtacgcgcagacctccgtgaagcacggatctaagaagagaagaattaaacaagattgaatagaagggctctctgtcatgatttcatactttcattattgagctctgtaattacaattatgaccatgagaacatctcttattgtgtggccttttaattgctgatgttagtactgaaccaaagcttatcgtgatgatgtaaaagcaataagtacttgtttgtagcttctttgtgtctccctttgggcttaatacatctgtttagtgttgtggctttggcatagacttctcttggtaataatgccttgcaatgcaaaatttcaattatcaaattctattatgttctcaccttatggtaacagcttaccctgtggaagatgagattcttgagttgagtcattgccaatttttggcattagcttttgaattagtgaattttgacaaaaattaccgtgacactgattttgttgaagctcttaagtgtagtttttacaaaatttcagtggctcgttgtgattatgtcaaactcacggcgaatgtagttcttacagaatttcagtggctcaaggatttaacgcgtgtatgcggccgcaaactatttaaatgcaggcgataaaaatgttttaaacgatatatattataaaaaaaaacgtttcaaaaataaatacaaaaatgtttttaaatatatataatttaactcattaaagaaaataaaaatgcaagtgcggtgacaagacaagctaaaagttgcaaaagaaatggcagggctataaggctcacctactcctggatttaccaaattttggttcgtccctatactcgaaaaataaaacaaaataaatttcagtatcttcgtttttgtatgctttgactgtgaggcgaggccaactttcttcttctgtctgagatgaattttgtttgcctcctgtgaaggatgtatcattcaaagtgaatgttttgcaactgccagtagtcccacatcgaccaaatattcttattacagtgtgtttatatagcacctggagaaggaatgggttgtttcaaagattaaataatttctactaagtgtagatcaagggactcaacatcaaaggattaatttctactaagtgtagatcaagggactcaacatcaaaggattaatttctactaagtgtagatcaagggactcaacatcaaaggattaatttctactaagtgtagatttttttttgcggccgcaacagagaaactagacctgcaggaaggcgccggcgctctcttaaggtagc

SEQ ID NO: 774-781 - skipped (8 entries)

SEQ ID NO: 782 - DNA, 3681 bp, synthetic construct
  source 1..3681: mol_type = other DNA
tccaagctggagaagtttacaaactgttacagcctctccaaaaccctcaggtttaaagcgatcccggtgggcaagacccaggagaacatcgacaacaagaggctcctggtggaagacgagaagcgcgccgaagactacaagggcgtgaagaagctgctcgataggtactacctcagctttattaacgacgtgctgcacagcatcaaactcaagaatctcaacaactacatctccctcttccgcaaaaagacccgcaccgagaaggagaacaaggagctggagaacctggagatcaacctccgcaaggaaatcgccaaagcgttcaagggcaatgaagggtacaagagcctcttcaagaaagacatcatcgaaactatcctcccagagtttctcgatgacaaggacgagatcgcgctggtgaactcctttaacgggttcacaaccgcgtttaccggcttctttgataacagggaaaatatgttctccgaggaggccaagtccaccagcatcgccttcaggtgtatcaacgagaacctcacccgctacatttccaatatggacattttcgagaaggtggatgcgatcttcgataagcacgaggtgcaggagatcaaagagaagattctcaattccgattatgacgtcgaggatttcttcgaaggggagttctttaattttgtgctcacacaagagggcattgacgtgtacaacgcgattatcgggggcttcgtcacagagtccggggagaagattaaggggctgaatgagtacatcaatctgtacaatcagaagaccaagcagaaactgccgaaattcaagccgctctacaagcaagtcctgtccgatagggaaagcctctccttctacggcgagggctataccagcgacgaggaggtgctggaagtcttccgcaacacactgaataagaatagcgagattttctcctccatcaagaagctcgagaagctctttaagaactttgacgagtacagctccgccgggattttcgtgaagaacgggccggcgatcagcaccatctccaaggacatctttggcgagtggaacgtcatcagggacaagtggaacgccgagtacgacgacatccacctgaagaagaaggcggtggtgaccgagaagtatgaggacgatcgcaggaagtccttcaaaaaaatcggctccttcagcctcgaacagctccaggagtatgccgatgcggatctgtccgtcgtcgagaagctgaaggaaatcatcattcagaaggtcgacgagatctataaagtgtacgggtccagcgagaagctgttcgacgccgactttgtgctcgagaagtccctcaaaaagaatgacgccgtggtggccattatgaaagacctgctcgactccgtgaagtccttcgaaaattacattaaagcgttctttggggaggggaaggaaactaacagggatgagtccttctatggcgactttgtcctcgcgtacgacatcctgctgaaggtcgaccacatttacgacgcgatccgcaactacgtgacacagaagccgtactccaaagacaagttcaagctgtacttccagaacccgcaatttatgcgcggctgggacaaggataaagagacagactaccgcgcgacaattctccgctatggctccaaatactatctggccatcatggacaagaagtacgcgaagtgcctgcagaagatcgacaaagacgacgtcaatggcaactatgaaaagatcaactacaagctgctgccgggcccgaacaagatgctcccgagggtgttcttcagcaagaagtggatggcctactacaatccaagcgaggatattcagaaaatctataaaaacgggaccttcaagaagggggacatgtttaacctcaacgactgccacaagctcattgatttcttcaaggatagcatttcccgctacccgaaatggtccaatgcgtacgattttaacttctccgagacagaaaagtacaaagacatcgcgggcttttacagggaggtggaggagcaagggtataaagtttcttttgaatccgcgagcaagaaggaagtcgacaagctcgtcgaggagggcaagctctacatgttccaaatttataacaaggacttttccgacaagagccatgggaccccaaacctccacaccatgtacttcaaactgctctttgacgagaacaaccacgggcaaatcaggctgagcggcggcgccgaattattcatgcgcagggcctccctcaagaaggaagagctggtcgtccatccagccaattccccgatcgcgaacaagaacccggacaatccgaaaaagaccaccaccctgtcctacgacgtctacaaggacaaacgcttcagcgaagaccagtacgaattacacatcccaattgcgattaataagtgcccaaagaatatcttcaaaattaatacagaggtcagggtgctgctcaaacacgacgacaatccgtatgtcatcggcattgacaggggcgagcgcaatctgctctatatcgtggtcgtggatgggaagggcaatattgtggagcagtactccctgaacgagattatcaacaacttcaatgggattaggattaagaccgactatcacagcctgctcgacaagaaagaaaaagagaggtttgaggcccgccaaaactggacctccattgagaatatcaaagaattaaaggccggctatatttcccaagtcgtccacaagatctgcgagctggtggagaaatatgacgccgtgattgcgctcgaagacttaaattctgggttcaagaactcccgcgtgaaggtggaaaaacaggtgtatcagaaattcgagaaaatgctgatcgacaaactcaattatatggtggataagaagtccaacccgtgtgccacagggggcgcgctgaagggctatcagatcaccaacaagttcgagagcttcaagagcatgagcacccagaacgggtttattttctacatcccggcgtggctcacctccaagattgacccgagcaccggcttcgtgaacctcctgaagacaaagtatacctccattgccgacagcaagaagtttatctcctccttcgaccgcattatgtatgtgccggaggaggacctcttcgagttcgccctcgactacaaaaacttcagccgcacagatgcggattacatcaagaagtggaagctgtactcctacgggaacaggatccgcatcttcaggaatccaaaaaaaaataacgtctttgactgggaggaagtgtgcctgacatccgcctacaaggaactgttcaataaatacggcatcaattaccagcagggcgacattcgcgccctcctctgtgagcagtccgacaaagcgttttactccagcttcatggccctcatgtccctgatgctccaaatgaggaatagcatcacagggcgcaccgacgtcgacttcctcatcagcccggtgaagaactccgacgggatcttttacgactcccgcaactatgaggcgcaagagaatgcgatcctcccgaagaacgccgatgcgaacggggcctataatatcgccaggaaagtgctctgggccatcgggcagttcaaaaaggcggaggatgagaagctcgacaaggtgaaaattgccatttccaacaaggagtggctggagtacgcgcagacctccgtgaagcac

SEQ ID NO: 783 - skipped

SEQ ID NO: 784 - DNA, 3729 bp, synthetic construct
  source 1..3729: mol_type = other DNA
cgcaccgagaaggagaacaaggagctggagaacctggagatcaacctccgcaaggaaatcgccaaagcgttcaagggcaatgaagggtacaagagcctcttcaagaaagacatcatcgaaactatcctcccagagtttctcgatgacaaggacgagatcgcgctggtgaactcctttaacgggttcacaaccgcgtttaccggcttctttgataacagggaaaatatgttctccgaggaggccaagtccaccagcatcgccttcaggtgtatcaacgagaacctcacccgctacatttccaatatggacattttcgagaaggtggatgcgatcttcgataagcacgaggtgcaggagatcaaagagaagattctcaattccgattatgacgtcgaggatttcttcgaaggggagttctttaattttgtgctcacacaagagggcattgacgtgtacaacgcgattatcgggggcttcgtcacagagtccggggagaagattaaggggctgaatgagtacatcaatctgtacaatcagaagaccaagcagaaactgccgaaattcaagccgctctacaagcaagtcctgtccgatagggaaagcctctccttctacggcgagggctataccagcgacgaggaggtgctggaagtcttccgcaacacactgaataagaatagcgagattttctcctccatcaagaagctcgagaagctctttaagaactttgacgagtacagctccgccgggattttcgtgaagaacgggccggcgatcagcaccatctccaaggacatctttggcgagtggaacgtcatcagggacaagtggaacgccgagtacgacgacatccacctgaagaagaaggcggtggtgaccgagaagtatgaggacgatcgcaggaagtccttcaaaaaaatcggctccttcagcctcgaacagctccaggagtatgccgatgcggatctgtccgtcgtcgagaagctgaaggaaatcatcattcagaaggtcgacgagatctataaagtgtacgggtccagcgagaagctgttcgacgccgactttgtgctcgagaagtccctcaaaaagaatgacgccgtggtggccattatgaaagacctgctcgactccgtgaagtccttcgaaaattacattaaagcgttctttggggaggggaaggaaactaacagggatgagtccttctatggcgactttgtcctcgcgtacgacatcctgctgaaggtcgaccacatttacgacgcgatccgcaactacgtgacacagaagccgtactccaaagacaagttcaagctgtacttccagaacccgcaatttatgcgcggctgggacaaggataaagagacagactaccgcgcgacaattctccgctatggctccaaatactatctggccatcatggacaagaagtacgcgaagtgcctgcagaagatcgacaaagacgacgtcaatggcaactatgaaaagatcaactacaagctgctgccgggcccgaacaagatgctcccgagggtgttcttcagcaagaagtggatggcctactacaatccaagcgaggatattcagaaaatctataaaaacgggaccttcaagaagggggacatgtttaacctcaacgactgccacaagctcattgatttcttcaaggatagcatttcccgctacccgaaatggtccaatgcgtacgattttaacttctccgagacagaaaagtacaaagacatcgcgggcttttacagggaggtggaggagcaagggtataaagtttcttttgaatccgcgagcaagaaggaagtcgacaagctcgtcgaggagggcaagctctacatgttccaaatttataacaaggacttttccgacaagagccatgggaccccaaacctccacaccatgtacttcaaactgctctttgacgagaacaaccacgggcaaatcaggctgagcggcggcgccgaattattcatgcgcagggcctccctcaagaaggaagagctggtcgtccatccagccaattccccgatcgcgaacaagaacccggacaatccgaaaaagaccaccaccctgtcctacgacgtctacaaggacaaacgcttcagcgaagaccagtacgaattacacatcccaattgcgattaataagtgcccaaagaatatcttcaaaattaatacagaggtcagggtgctgctcaaacacgacgacaatccgtatgtcatcggcattgacaggggcgagcgcaatctgctctatatcgtggtcgtggatgggaagggcaatattgtggagcagtactccctgaacgagattatcaacaacttcaatgggattaggattaagaccgactatcacagcctgctcgacaagaaagaaaaagagaggtttgaggcccgccaaaactggacctccattgagaatatcaaagaattaaaggccggctatatttcccaagtcgtccacaagatctgcgagctggtggagaaatatgacgccgtgattgcgctcgaagacttaaattctgggttcaagaactcccgcgtgaaggtggaaaaacaggtgtatcagaaattcgagaaaatgctgatcgacaaactcaattatatggtggataagaagtccaacccgtgtgccacagggggcgcgctgaagggctatcagatcaccaacaagttcgagagcttcaagagcatgagcacccagaacgggtttattttctacatcccggcgtggctcacctccaagattgacccgagcaccggcttcgtgaacctcctgaagacaaagtatacctccattgccgacagcaagaagtttatctcctccttcgaccgcattatgtatgtgccggaggaggacctcttcgagttcgccctcgactacaaaaacttcagccgcacagatgcggattacatcaagaagtggaagctgtactcctacgggaacaggatccgcatcttcaggaatccaaaaaaaaataacgtctttgactgggaggaagtgtgcctgacatccgcctacaaggaactgttcaataaatacggcatcaattaccagcagggcgacattcgcgccctcctctgtgagcagtccgacaaagcgttttactccagcttcatggccctcatgtccctgatgctccaaatgaggaatagcatcacagggcgcaccgacgtcgacttcctcatcagcccggtgaagaactccgacgggatcttttacgactcccgcaactatgaggcgcaagagaatgcgatcctcccgaagaacgccgatgcgaacggggcctataatatcgccaggaaagtgctctgggccatcgggcagttcaaaaaggcggaggatgagaagctcgacaaggtgaaaattgccatttccaacaaggagtggctggagtacgcgcagacctccgtgaagcacggctcctctggcagctccggctctagcggctcctctggcagctccggctccaagctggagaagtttacaaactgttacagcctctccaaaaccctcaggtttaaagcgatcccggtgggcaagacccaggagaacatcgacaacaagaggctcctggtggaagacgagaagcgcgccgaagactacaagggcgtgaagaagctgctcgataggtactacctcagctttattaacgacgtgctgcacagcatcaaactcaagaatctcaacaactacatctccctcttccgcaaaaagacc

SEQ ID NO: 785-786 - skipped (2 entries)

SEQ ID NO: 787 - DNA, 3729 bp, synthetic construct
  source 1..3729: mol_type = other DNA
tccgacgggatcttttacgactcccgcaactatgaggcgcaagagaatgcgatcctcccgaagaacgccgatgcgaacggggcctataatatcgccaggaaagtgctctgggccatcgggcagttcaaaaaggcggaggatgagaagctcgacaaggtgaaaattgccatttccaacaaggagtggctggagtacgcgcagacctccgtgaagcacggctcctctggcagctccggctctagcggctcctctggcagctccggctccaagctggagaagtttacaaactgttacagcctctccaaaaccctcaggtttaaagcgatcccggtgggcaagacccaggagaacatcgacaacaagaggctcctggtggaagacgagaagcgcgccgaagactacaagggcgtgaagaagctgctcgataggtactacctcagctttattaacgacgtgctgcacagcatcaaactcaagaatctcaacaactacatctccctcttccgcaaaaagacccgcaccgagaaggagaacaaggagctggagaacctggagatcaacctccgcaaggaaatcgccaaagcgttcaagggcaatgaagggtacaagagcctcttcaagaaagacatcatcgaaactatcctcccagagtttctcgatgacaaggacgagatcgcgctggtgaactcctttaacgggttcacaaccgcgtttaccggcttctttgataacagggaaaatatgttctccgaggaggccaagtccaccagcatcgccttcaggtgtatcaacgagaacctcacccgctacatttccaatatggacattttcgagaaggtggatgcgatcttcgataagcacgaggtgcaggagatcaaagagaagattctcaattccgattatgacgtcgaggatttcttcgaaggggagttctttaattttgtgctcacacaagagggcattgacgtgtacaacgcgattatcgggggcttcgtcacagagtccggggagaagattaaggggctgaatgagtacatcaatctgtacaatcagaagaccaagcagaaactgccgaaattcaagccgctctacaagcaagtcctgtccgatagggaaagcctctccttctacggcgagggctataccagcgacgaggaggtgctggaagtcttccgcaacacactgaataagaatagcgagattttctcctccatcaagaagctcgagaagctctttaagaactttgacgagtacagctccgccgggattttcgtgaagaacgggccggcgatcagcaccatctccaaggacatctttggcgagtggaacgtcatcagggacaagtggaacgccgagtacgacgacatccacctgaagaagaaggcggtggtgaccgagaagtatgaggacgatcgcaggaagtccttcaaaaaaatcggctccttcagcctcgaacagctccaggagtatgccgatgcggatctgtccgtcgtcgagaagctgaaggaaatcatcattcagaaggtcgacgagatctataaagtgtacgggtccagcgagaagctgttcgacgccgactttgtgctcgagaagtccctcaaaaagaatgacgccgtggtggccattatgaaagacctgctcgactccgtgaagtccttcgaaaattacattaaagcgttctttggggaggggaaggaaactaacagggatgagtccttctatggcgactttgtcctcgcgtacgacatcctgctgaaggtcgaccacatttacgacgcgatccgcaactacgtgacacagaagccgtactccaaagacaagttcaagctgtacttccagaacccgcaatttatgcgcggctgggacaaggataaagagacagactaccgcgcgacaattctccgctatggctccaaatactatctggccatcatggacaagaagtacgcgaagtgcctgcagaagatcgacaaagacgacgtcaatggcaactatgaaaagatcaactacaagctgctgccgggcccgaacaagatgctcccgagggtgttcttcagcaagaagtggatggcctactacaatccaagcgaggatattcagaaaatctataaaaacgggaccttcaagaagggggacatgtttaacctcaacgactgccacaagctcattgatttcttcaaggatagcatttcccgctacccgaaatggtccaatgcgtacgattttaacttctccgagacagaaaagtacaaagacatcgcgggcttttacagggaggtggaggagcaagggtataaagtttcttttgaatccgcgagcaagaaggaagtcgacaagctcgtcgaggagggcaagctctacatgttccaaatttataacaaggacttttccgacaagagccatgggaccccaaacctccacaccatgtacttcaaactgctctttgacgagaacaaccacgggcaaatcaggctgagcggcggcgccgaattattcatgcgcagggcctccctcaagaaggaagagctggtcgtccatccagccaattccccgatcgcgaacaagaacccggacaatccgaaaaagaccaccaccctgtcctacgacgtctacaaggacaaacgcttcagcgaagaccagtacgaattacacatcccaattgcgattaataagtgcccaaagaatatcttcaaaattaatacagaggtcagggtgctgctcaaacacgacgacaatccgtatgtcatcggcattgacaggggcgagcgcaatctgctctatatcgtggtcgtggatgggaagggcaatattgtggagcagtactccctgaacgagattatcaacaacttcaatgggattaggattaagaccgactatcacagcctgctcgacaagaaagaaaaagagaggtttgaggcccgccaaaactggacctccattgagaatatcaaagaattaaaggccggctatatttcccaagtcgtccacaagatctgcgagctggtggagaaatatgacgccgtgattgcgctcgaagacttaaattctgggttcaagaactcccgcgtgaaggtggaaaaacaggtgtatcagaaattcgagaaaatgctgatcgacaaactcaattatatggtggataagaagtccaacccgtgtgccacagggggcgcgctgaagggctatcagatcaccaacaagttcgagagcttcaagagcatgagcacccagaacgggtttattttctacatcccggcgtggctcacctccaagattgacccgagcaccggcttcgtgaacctcctgaagacaaagtatacctccattgccgacagcaagaagtttatctcctccttcgaccgcattatgtatgtgccggaggaggacctcttcgagttcgccctcgactacaaaaacttcagccgcacagatgcggattacatcaagaagtggaagctgtactcctacgggaacaggatccgcatcttcaggaatccaaaaaaaaataacgtctttgactgggaggaagtgtgcctgacatccgcctacaaggaactgttcaataaatacggcatcaattaccagcagggcgacattcgcgccctcctctgtgagcagtccgacaaagcgttttactccagcttcatggccctcatgtccctgatgctccaaatgaggaatagcatcacagggcgcaccgacgtcgacttcctcatcagcccggtgaagaac

SEQ ID NO: 788-789 - skipped (2 entries)

SEQ ID NO: 790 - DNA, 15491 bp, synthetic construct
  source 1..15491: mol_type = other DNA
aaggatccctgaaagcgacgttggatgttaacatctacaaattgccttttcttatcgaccatgtacgtaagcgcttacgtttttggtggacccttgaggaaactggtagctgttgtgggcctgtggactcaagatggatcattaatttccaccttcacctacgatggggggcatcgcaccggtgagtaatattgtacggctaagagcgaatttggcctgtagacctcaattgcgagctttctaatttcaaactattcgggcctaacttttggtgtgatgatgctgactggcaggatatataccgttgtaatttgagctcgtgtgaataagtcgctgtgtatgtttgtttgattgtttctgttggagtgcagcccatttcaccggacaagtcggctagattgatttagccctgatgaactgccgaggggaagccatcttgagcgcggaatgggaatggatttcgttgtacaacgacacgacagaacacccacgggaccgagcttcgaagctttaacgcttgagttaagccgcgccgcgaagcggcgtcggcttgaacgaattgttagacatcagaagaactcgtcaagaaggcgatagaaggcgatgcgctgcgaatcgggagcggcgataccgtaaagcacgaggaagcggtcagcccattcgccgccaagctcttcagcaatatcacgggtagccaacgctatgtcctgatagcggtccgccacacccagccggccacagtcgatgaatccagaaaagcggccattttccaccatgatattcggcaagcaggcatcgccatgggtcacgacgagatcctcgccgtcgggcatgcgcgccttgagcctggcgaacagttcggctggcgcgagcccctgatgctcttcgtccagatcatcctgatcgacaagaccggcttccatccgagtacgtgctcgctcgatgcgatgtttcgcttggtggtcgaatgggcaggtagccggatcaagcgtatgcagccgccgcattgcatcagccatgatggatactttctcggcaggagcaaggtgagatgacaggagatcctgccccggcacttcgcccaatagcagccagtcccttcccgcttcagtgacaacgtcgagcacagctgcgcaaggaacgcccgtcgtggccagccacgatagccgcgctgcctcgtcctgcagttcattcagggcaccggacaggtcggtcttgacaaaaagaaccgggcgcccctgcgctgacagccggaacacggcggcatcagagcagccgattgtctgttgtgcccagtcatagccgaatagcctctccacccaagcggccggagaacctgcgtgcaatccatcttgttcaatcatggctttgtttctccttcaatcattgactattgtcacgttattctgaatcgacgagaactcacatcaatctcaacaagcatctctgctcgcgaaattggtgttgtctcattaaaacgtgaccgtcaaagtctattcactaggacccaaatctctccaggtcccgcaagctagcttcgccgcccacgtttctctttcttctcatattcaattgtcaaaaaacagacctcatgaccaaaatcccttaacgtgagttttcgttccactgagcgtcagaccccgtagaaaagatcaaaggatcttcttgagatcctttttttctgcgcgtaatctgctgcttgcaaacaaaaaaaccaccgctaccagcggtggtttgtttgccggatcaagagctaccaactttttttccgaaggtaactggcttcagcagagcgcagataccaaatactgtccttctagtgtagccgtagttaggccaccacttcaagaactctgtagcaccgcctacatacctcgctctgctaatcctgttaccagtggctgctgccagtggcgataagtcgtgtcttaccgggttggactcaagacgatagttaccggataaggcgcagcggtcgggctgaacggggggttcgtgcacacagcccagcttggagcgaacgacctacaccgaactgagatacctacagcgtgagctatgagaaagcgccacgcttcccgaagggagaaaggcggacaggtatccggtaagcggcagggtcggaacaggagagcgcacgagggagcttccagggggaaacgcctggtatctttatagtcctgtcgggtttcgccacctctgacttgagcgtcgatttttgtgatgctcgtcaggggggcggagcctatggaaaaacgccagcaacgcggcctttttacggttcctggccttttgctggccttttgctcacatgttctttcctgcgttatcccctgattctgtggataaccgtattaccgcctttgagtgagctgataccgctcgccgcagccgaacgaccgagcgcagcgagtcagtgagcgaggaagcggaagagcgcctgatgcggtattttctccttacgcatctgtgcggtatttcacaccgcatatggtgcactctcagtacaatctgctctgatgccgcatagttaagccagtatacaggctctccttcacgatcaacgatcggcatggggccttcgtgcttgttgagtaatgttatcgctcccatcagagcacgcttggtactccgggaatcggatggtctgtcgatcatccaaaaaacgctcatgttttcaacctattaggtctgtggtcagctgaccacagaccatcctgctccatactcgctaattctagccaaaccgcaacgtcccctgcccgctagccttcaagagcgccattatcatcgggccaagtgaaaacttcccgagctcgctccgccgtgtcagatctcggagatagcccccgggcgaattgatgaagttcgctcgctccaaaatgcacgccatcgctgctgccgcattctccggtcccattgcctcacacgcgtcttggtaagccgacgggctgacccccagcatagaccgaaccaccaccgcagccgacatgaggtcacgccagctagcaaccgcaccgctcggcccataattgccaatggtcgggcatgctttcaggatcatcccgagggggaacgcttttatcggctcgctccttgcccggtctatttcactcggcttagcgccctgctccttttcagagcgaggttcaagttcattaacggattcgggttttgaattctgtatgtgctgctcgctctgggcagcattggtgctattattttctgaattgtctctaatttccaaccggttgattatctcttcctggagcatccacatctcttcgagaattgactctacatcagcaagcgtcggggcgcgtggaattctacccacaagttccacatagacttcctcgacagcttgccagtcgccctccgctccctcttccatagctgccgtaattagcttccgaacgtcccgtcggcaaatcgtcagactttctttggccatcctgaatgctgctcgatcggccatcacttgctgtgccatcatcgctagctcttcggaccgcgcgagaagcggagacaaatcgaagccaaacgcgcgctcgatctgaccagcgccatccttacgagcgtaacgctttccgttggcgctatccttccggacgatcaagcctgactccacgagcatggcgatgtgcctacgcaaagtcgcgccagccatcccatgcgcccgaagggcaagctgagcattcgacgggaagacgatcagctgtgcctcctgacgcaactccgtttccgggtgaaagctcaatagcgcatcaaggacggcaagactgttggactggattccaagtagttccatggccgcggacgcatctctaaagaccttccacttgtccgctgtcttgccttgtttgatatcggccagcgccgtctggcgccgcacaagcgcaagcgtcattggccgccgcccgaatggcgtcgttacacttcctgtctgcatcatctttcacctttcagcaggcaaaggaaatcagctcaccaaaacggcgctaaaaactcttgacgaggattcgaggaaatgcgattctgttcgcgctagagagacagaagggcttccgcgacggcgacgttgagggggctcttttcttttgcggtttactctccccgtttccgttggttctcagcgtggtacgcttgatacagcgctggcacatgatcgagcacgaaggtcgcaaaatcgggcgtcgccttcctgtcaatcgtgatttccagtttggccttgctctgcgtcacctgtgcaattctggtgccgtctggggtggccatgacctcgggaagtccacgcgcaacccgactgggcttcagactagcgatcaccgccttgaatcgttctgccgatggcagcgcttgaacttcctccgacatagcatatttagccacgtcggccggtgaagaaactttctcaatcagctcggcaagttgttgccaactcggccgtccaacaccaggagcggcaccaatagcatcggtcagttcagaggggagggcgtcgacgagcagaagcatcttggacaaattgctcttgtcgatcgacatcgcggcgatgacaatctctcgagaaaactgcctgttcaggcgatgtgcgaagcgcgccttttcgatgaaggtaagatcttcgcgctcattgttttcctgaccctgtgctacgaccacttgctcgtccgtcagttcgcgaacgaccgctctgaccggaagtccgagttctgaaacggcgcgtagccggcggtggccgaaggcaacctgatatcggcccggctggctcggatgcggtcgcacaaggattgggacttgctgtccttgttcccggatcgaagtaaggagcccgtcaatgtcccctcgcatacgatcctgcacgaaagacggttctattgacgaggcatccaactctatcactgcctgaccttcagcgaggcgccgctcgatctcttcggcacggctaagacgatcgttttgctctcgcagtgcgttaccaatgttcgctgtgagcttcgttgccggatcgcgctccttccttgttacgccgaggagcggcatggagcggttctttgccgtcctattgtcggcgggcgacgtttcaggggcgtcagttgacacgccaaggatgtgcttccggctcatgtgggcctaccccatgcttttttgatcagtgtttcgatctcgtcgttgacggcgttcatcgcctccaaggctcgatcataggtcgagcgcgtgaacaggccacgctccacttcgaatagagtctggtttgtcaggccagcgtccgaaaccgcggtggttttaagcatcggaaaattgaggacattttcgccaaaaatcgaccgcagataacctaccatttggttctgtggtccgtcgctcggttcgaaacgggttatcagatagcgcatccaattaaacttgaacttggcgccagcattctcgatttcacgcaaaaggttcgatgtcattgccagaaactggttcatcgacatcacatccagcatctgcggatggaccgtgacaagaatggacgtcgccgcagtcaatgcggatagcgtgagatacccaagctggggagggcagtcgatgaccacgacgtcatagttatccgcgatatcttcaattacttggctgatgcgaccataaaagagcgtgtcgccctctttgcggttcatcagcgcgcgtggcgtatcgtgttcaaactccatcagctcaaggttaccaggaatcaggtggaggtcgggaatgtaagtccctcggacgactcgttcgattgccacttgctcatcatcataccttatagcgccgtagagcgtttcgttcgggccaacgtccgtttccggttggctcccaaagagtgcagaaaggctcgcttgaggatcgagatcaatggccaagactcgatatccgcgcatagcgaggtactgcgccagatgcgcggcggtggtggtcttacccgacccacctttgaaattcatcacagagataacctgaagctgctcgccgcctcgacgatgtggcaggtagcgccggttcccgcggccgacctgatccatatacttccgaatcacatggatatcttcaattgagaacattcgcctgccacccgggctcatgctaacattcaactctggcatctcagacgcggtctgccgtaaatatgactcgccaacgccgagcagcttggacgcctccgatggcccgaatgttcgaatgcccttctcggaatgcggcgggaaaaccttaagatgatgtgcttgaagttggctcgagagggcatcggcatgacgctccatcaaggccgtcaaccctacaactacaggcgctgcttttaggacagacttcgccatctcaaacccattccttgccagtggcgatatttttcgcgaaactggaaaagttccgccgctggcaattagcgccgattctgctgtttgggcaagagcttttaggttaacagaaggttaacgccctcaggtcgaaaaactccacccaactgttatttgtatttatttccaatgccttagagagattgccatttgaatatgttcatgtattgttttagtgataatcctacaatcgtaacccaaaaagaggtcgccctctgcgcgccgtcgtccaatataggcgaagtcacccttgcgactcaggcggattctaccttgtacacgtgtcgagtggaaaagtcccatgtggatcactccgttgccccgtcgctcaccgtgttggggggaaggtgcacatggctcagttctcaatggaaattatctgcctaaccggctcagttctgcgtagaaaccaacatgcaagctccaccgggtgcaaagcggcagcggcggcaggatatattcaattgtaaatggcttcatgtccgggaaatctacatggatcagcaatgagtatgatggtcaatatggagaaaaagaaagagtaattaccaattttttttcaattcaaaaatgtagatgtccgcagcgttattataaaatgaaagtacattttgataaaacgacaaattacgatccgtcgtatttataggcgaaagcaataaacaaattattctaattcggaaatctttatttcgacgtgtctacattcacgtccaaatgggggcttagatgagaaacttcacgatcgatgcggccctgccggcgcgccactagtcaacaattggccaatctttgttctaaattgctaataaacgaccatttccgtcaattctccttggttgcaacagtctacccgtcaaatgtttactaatttataagtgtgaagtttgaattatgaaagacgaaatcgtattaaaaattcacaagaataaacaactccatagattttcaaaaaaacagtcacgagaaaaaaaccacagtccgtttgtctgctcttctagtttttattatttttctattaatagttttttgttatttcgagaataaaatttgaacgatgtccgaaccacaaaagccgagccgataaatcctaagccgagcctaactttagccgtaaccatcagtcacggctcccgggctaattcatttgaaccgaatcataatcaacggtttagatcaaactcaaaacaatctaacggcaacatagacgcgtcggtgagctaaaaagagtgtgaaagccaggtcaccatagcattgtctctcccagattttttatttgggaaataatagaagaaatagaaaaaaataaaagagtgagaaaaatcgtagagctatatattcgcacatgtactcgtttcgctttccttagtgttagctgctgccgctgttgtttctcctccatttctctatctttctctctcgctgcttctcgaatcttctgtatcatcttcttcttcttcaaggtgagtctctagatccgttcgcttgattttgctgctcgttagtcgttattgttgattctctatgccgatttcgctagatctgtttagcatgcgttgtggttttatgagaaaatctttgttttgggggttgcttgttatgtgattcgatccgtgcttgttggatcgatctgagctaattcttaaggtttatgtgttagatctatggagtttgaggattcttctcgcttctgtcgatctctcgctgttatttttgtttttttcagtgaagtgaagttgtttagttcgaaatgacttcgtgtatgctcgattgatctggttttaatcttcgatctgttaggtgttgatgtttacaagtgaattctagtgttttctcgttgagatctgtgaagtttgaacctagttttctcaataatcaacatatgaagcgatgtttgagtttcaataaacgctgctaatcttcgaaactaagttgtgatctgattcgtgtttacttcatgagcttatccaattcatttcggtttcattttactttttttttagtgaaccatggcgcaagttagcagaatctgcaatggtgtgcagaacccatctcttatctccaatctctcgaaatccagtcaacgcaaatctcccttatcggtttctctgaagacgcagcagcatccacgagcttatccgatttcgtcgtcgtggggattgaagaagagtgggatgacgttaattggctctgagcttcgtcctcttaaggtcatgtcttctgtttccacggcgtgcatgggggaagcggtgatcgccgaagtatcgactcaactatcagaggtagttggcgtcatcgagcgccatctcgaaccgacgttgctggccgtacatttgtacggctccgcagtggatggcggcctgaagccacacagtgatattgatttgctggttacggtgaccgtaaggcttgatgaaacaacgcggcgagctttgatcaacgaccttttggaaacttcggcttcccctggagagagcgagattctccgcgctgtagaagtcaccattgttgtgcacgacgacatcattccgtggcgttatccagctaagcgcgaactgcaatttggagaatggcagcgcaatgacattcttgcaggtatcttcgagccagccacgatcgacattgatctggctatcttgctgacaaaagcaagagaacatagcgttgccttggtaggtccagcggcggaggaactctttgatccggttcctgaacaggatctatttgaggcgctaaatgaaaccttaacgctatggaactcgccgcccgactgggctggcgatgagcgaaatgtagtgcttacgttgtcccgcatttggtacagcgcagtaaccggcaaaatcgcgccgaaggatgtcgctgccgactgggcaatggagcgcctgccggcccagtatcagcccgtcatacttgaagctagacaggcttatcttggacaagaagaagatcgcttggcctcgcgcgcagatcagttggaagaatttgtccactacgtgaaaggcgagatcaccaaggtagtcggcaaataaggatcaattcccgatcgttcaaacatttggcaataaagtttcttaagattgaatcctgttgccggtcttgcgatgattatcatataatttctgttgaattacgttaagcatgtaataattaacatgtaatgcatgacgttatttatgagatgggtttttatgattagagtcccgcaattatacatttaatacgcgatagaaaacaaaatatagcgcgcaaactaggataaattatcgcgcgcggtgtcatctatgttactagatcacgcgtgtatgcaatatcctgcagggtattaattaattatgccctaagacatcctggaccaatatgctgaagattatgctacctacaccaggataggacttgaagcacttaaccttgaagattggttcgaagaaccagaacccgatccacctaaccctgtggaccgccagaggatagaggacatcctggacctactgaacgtcagcaatgacgactgaaagattcccaggacaccggcggaagtggtggacccagtctaggtgcgatgcttagtcgcgcacgatgactatgtcggaaggcatctttgctttcggcaaactttagtaatactttaaggaaagtattgtacaagttaggtgcagagacaataatgcacccagctttagctttgtttatggaattattgtgtcggttgcattattggatgcctgcgtgcaccctaagcaatcaacggagaaacaaagataaaaatcaattactcacatgaaagagtattgatcacgagtcactatggagcgacaatctccagacaggatgtcagcatcttatcttcctttgaagaaagcatcatcaataacgatgtaatggtggggacatccactaagttattgctctgcaaacagctcaaaaagctactggccgacaatcataattgctcggcatgtccaggtggggcctccactagcaataatacaagctttacagcttgcagtgactcatcctccaataatggagaaaaagacgtcagcagtgacgaacaagggtcgaaagacttgcctatataagggcattctcccctcagttgaagatcatcgaaagttggagcaataaactctctcttcaacaaatctatcttttatcttttatcgccgcaagccaccatggcgggatctaagaagagaagaattaaacaagattccaagctggagaagtttacaaactgttacagcctctccaaaaccctcaggtttaaagcgatcccggtgggcaagacccaggagaacatcgacaacaagaggctcctggtggaagacgagaagcgcgccgaagactacaagggcgtgaagaagctgctcgataggtactacctcagctttattaacgacgtgctgcacagcatcaaactcaagaatctcaacaactacatctccctcttccgcaaaaagacccgcaccgagaaggagaacaaggagctggagaacctggagatcaacctccgcaaggaaatcgccaaagcgttcaagggcaatgaagggtacaagagcctcttcaagaaagacatcatcgaaactatcctcccagagtttctcgatgacaaggacgagatcgcgctggtgaactcctttaacgggttcacaaccgcgtttaccggcttctttgataacagggaaaatatgttctccgaggaggccaagtccaccagcatcgccttcaggtgtatcaacgagaacctcacccgctacatttccaatatggacattttcgagaaggtggatgcgatcttcgataagcacgaggtgcaggagatcaaagagaagattctcaattccgattatgacgtcgaggatttcttcgaaggggagttctttaattttgtgctcacacaagagggcattgacgtgtacaacgcgattatcgggggcttcgtcacagagtccggggagaagattaaggggctgaatgagtacatcaatctgtacaatcagaagaccaagcagaaactgccgaaattcaagccgctctacaagcaagtcctgtccgatagggaaagcctctccttctacggcgagggctataccagcgacgaggaggtgctggaagtcttccgcaacacactgaataagaatagcgagattttctcctccatcaagaagctcgagaagctctttaagaactttgacgagtacagctccgccgggattttcgtgaagaacgggccggcgatcagcaccatctccaaggacatctttggcgagtggaacgtcatcagggacaagtggaacgccgagtacgacgacatccacctgaagaagaaggcggtggtgaccgagaagtatgaggacgatcgcaggaagtccttcaaaaaaatcggctccttcagcctcgaacagctccaggagtatgccgatgcggatctgtccgtcgtcgagaagctgaaggaaatcatcattcagaaggtcgacgagatctataaagtgtacgggtccagcgagaagctgttcgacgccgactttgtgctcgagaagtccctcaaaaagaatgacgccgtggtggccattatgaaagacctgctcgactccgtgaagtccttcgaaaattacattaaagcgttctttggggaggggaaggaaactaacagggatgagtccttctatggcgactttgtcctcgcgtacgacatcctgctgaaggtcgaccacatttacgacgcgatccgcaactacgtgacacagaagccgtactccaaagacaagttcaagctgtacttccagaacccgcaatttatgcgcggctgggacaaggataaagagacagactaccgcgcgacaattctccgctatggctccaaatactatctggccatcatggacaagaagtacgcgaagtgcctgcagaagatcgacaaagacgacgtcaatggcaactatgaaaagatcaactacaagctgctgccgggcccgaacaagatgctcccgagggtgttcttcagcaagaagtggatggcctactacaatccaagcgaggatattcagaaaatctataaaaacgggaccttcaagaagggggacatgtttaacctcaacgactgccacaagctcattgatttcttcaaggatagcatttcccgctacccgaaatggtccaatgcgtacgattttaacttctccgagacagaaaagtacaaagacatcgcgggcttttacagggaggtggaggagcaagggtataaagtttcttttgaatccgcgagcaagaaggaagtcgacaagctcgtcgaggagggcaagctctacatgttccaaatttataacaaggacttttccgacaagagccatgggaccccaaacctccacaccatgtacttcaaactgctctttgacgagaacaaccacgggcaaatcaggctgagcggcggcgccgaattattcatgcgcagggcctccctcaagaaggaagagctggtcgtccatccagccaattccccgatcgcgaacaagaacccggacaatccgaaaaagaccaccaccctgtcctacgacgtctacaaggacaaacgcttcagcgaagaccagtacgaattacacatcccaattgcgattaataagtgcccaaagaatatcttcaaaattaatacagaggtcagggtgctgctcaaacacgacgacaatccgtatgtcatcggcattgacaggggcgagcgcaatctgctctatatcgtggtcgtggatgggaagggcaatattgtggagcagtactccctgaacgagattatcaacaacttcaatgggattaggattaagaccgactatcacagcctgctcgacaagaaagaaaaagagaggtttgaggcccgccaaaactggacctccattgagaatatcaaagaattaaaggccggctatatttcccaagtcgtccacaagatctgcgagctggtggagaaatatgacgccgtgattgcgctcgaagacttaaattctgggttcaagaactcccgcgtgaaggtggaaaaacaggtgtatcagaaattcgagaaaatgctgatcgacaaactcaattatatggtggataagaagtccaacccgtgtgccacagggggcgcgctgaagggctatcagatcaccaacaagttcgagagcttcaagagcatgagcacccagaacgggtttattttctacatcccggcgtggctcacctccaagattgacccgagcaccggcttcgtgaacctcctgaagacaaagtatacctccattgccgacagcaagaagtttatctcctccttcgaccgcattatgtatgtgccggaggaggacctcttcgagttcgccctcgactacaaaaacttcagccgcacagatgcggattacatcaagaagtggaagctgtactcctacgggaacaggatccgcatcttcaggaatccaaaaaaaaataacgtctttgactgggaggaagtgtgcctgacatccgcctacaaggaactgttcaataaatacggcatcaattaccagcagggcgacattcgcgccctcctctgtgagcagtccgacaaagcgttttactccagcttcatggccctcatgtccctgatgctccaaatgaggaatagcatcacagggcgcaccgacgtcgacttcctcatcagcccggtgaagaactccgacgggatcttttacgactcccgcaactatgaggcgcaagagaatgcgatcctcccgaagaacgccgatgcgaacggggcctataatatcgccaggaaagtgctctgggccatcgggcagttcaaaaaggcggaggatgagaagctcgacaaggtgaaaattgccatttccaacaaggagtggctggagtacgcgcagacctccgtgaagcacggatctaagaagagaagaattaaacaagattgaatagaagggctctctgtcatgatttcatactttcattattgagctctgtaattacaattatgaccatgagaacatctcttattgtgtggccttttaattgctgatgttagtactgaaccaaagcttatcgtgatgatgtaaaagcaataagtacttgtttgtagcttctttgtgtctccctttgggcttaatacatctgtttagtgttgtggctttggcatagacttctcttggtaataatgccttgcaatgcaaaatttcaattatcaaattctattatgttctcaccttatggtaacagcttaccctgtggaagatgagattcttgagttgagtcattgccaatttttggcattagcttttgaattagtgaattttgacaaaaattaccgtgacactgattttgttgaagctcttaagtgtagtttttacaaaatttcagtggctcgttgtgattatgtcaaactcacggcgaatgtagttcttacagaatttcagtggctcaaggatttaacgcgtgtatgcggccgcaaactatatcctgcagggtattaattaattatgccaatctgtgaagagtttattcacgattaatctaggaggaagcgcgctttgttggctgtaggcccaaagcagcaatcaacagagtgtgtgagggccagctgctggaaggttcggttttttcaacaggcccacacgcgcgggctgggctgggctgggctggccacgttccttcggtagcagttcggtggagcaacgaggacggtggaatcgaagtttagtaccacctcggctgaagatacggagaaagaccagtttataacctgcctctggagcctgctgctcggtttcaaagattaaataatttctactaagtgtagatggcagtgtactcagcaaaggttttaatttctactaagtgtagatgtaggatccttcttctcaacgtttaatttctactaagtgtagatttgctaccgacccagtgagtggttaatttctactaagtgtagatgttcaaggtttggtggaccactctaatttctactaagtgtagatgttcagaccttcaaatggaaacctaatttctactaagtgtagatttttttttggatttaacgcgtgtatgcggccgcaacagagaaactagacctgcaggaaggcgccggcgctctcttaaggtagc

SEQ ID NO: 791 - DNA, 15491 bp, synthetic construct
  source 1..15491: mol_type = other DNA
aaggatccctgaaagcgacgttggatgttaacatctacaaattgccttttcttatcgaccatgtacgtaagcgcttacgtttttggtggacccttgaggaaactggtagctgttgtgggcctgtggactcaagatggatcattaatttccaccttcacctacgatggggggcatcgcaccggtgagtaatattgtacggctaagagcgaatttggcctgtagacctcaattgcgagctttctaatttcaaactattcgggcctaacttttggtgtgatgatgctgactggcaggatatataccgttgtaatttgagctcgtgtgaataagtcgctgtgtatgtttgtttgattgtttctgttggagtgcagcccatttcaccggacaagtcggctagattgatttagccctgatgaactgccgaggggaagccatcttgagcgcggaatgggaatggatttcgttgtacaacgacacgacagaacacccacgggaccgagcttcgaagctttaacgcttgagttaagccgcgccgcgaagcggcgtcggcttgaacgaattgttagacatcagaagaactcgtcaagaaggcgatagaaggcgatgcgctgcgaatcgggagcggcgataccgtaaagcacgaggaagcggtcagcccattcgccgccaagctcttcagcaatatcacgggtagccaacgctatgtcctgatagcggtccgccacacccagccggccacagtcgatgaatccagaaaagcggccattttccaccatgatattcggcaagcaggcatcgccatgggtcacgacgagatcctcgccgtcgggcatgcgcgccttgagcctggcgaacagttcggctggcgcgagcccctgatgctcttcgtccagatcatcctgatcgacaagaccggcttccatccgagtacgtgctcgctcgatgcgatgtttcgcttggtggtcgaatgggcaggtagccggatcaagcgtatgcagccgccgcattgcatcagccatgatggatactttctcggcaggagcaaggtgagatgacaggagatcctgccccggcacttcgcccaatagcagccagtcccttcccgcttcagtgacaacgtcgagcacagctgcgcaaggaacgcccgtcgtggccagccacgatagccgcgctgcctcgtcctgcagttcattcagggcaccggacaggtcggtcttgacaaaaagaaccgggcgcccctgcgctgacagccggaacacggcggcatcagagcagccgattgtctgttgtgcccagtcatagccgaatagcctctccacccaagcggccggagaacctgcgtgcaatccatcttgttcaatcatggctttgtttctccttcaatcattgactattgtcacgttattctgaatcgacgagaactcacatcaatctcaacaagcatctctgctcgcgaaattggtgttgtctcattaaaacgtgaccgtcaaagtctattcactaggacccaaatctctccaggtcccgcaagctagcttcgccgcccacgtttctctttcttctcatattcaattgtcaaaaaacagacctcatgaccaaaatcccttaacgtgagttttcgttccactgagcgtcagaccccgtagaaaagatcaaaggatcttcttgagatcctttttttctgcgcgtaatctgctgcttgcaaacaaaaaaaccaccgctaccagcggtggtttgtttgccggatcaagagctaccaactttttttccgaaggtaactggcttcagcagagcgcagataccaaatactgtccttctagtgtagccgtagttaggccaccacttcaagaactctgtagcaccgcctacatacctcgctctgctaatcctgttaccagtggctgctgccagtggcgataagtcgtgtcttaccgggttggactcaagacgatagttaccggataaggcgcagcggtcgggctgaacggggggttcgtgcacacagcccagcttggagcgaacgacctacaccgaactgagatacctacagcgtgagctatgagaaagcgccacgcttcccgaagggagaaaggcggacaggtatccggtaagcggcagggtcggaacaggagagcgcacgagggagcttccagggggaaacgcctggtatctttatagtcctgtcgggtttcgccacctctgacttgagcgtcgatttttgtgatgctcgtcaggggggcggagcctatggaaaaacgccagcaacgcggcctttttacggttcctggccttttgctggccttttgctcacatgttctttcctgcgttatcccctgattctgtggataaccgtattaccgcctttgagtgagctgataccgctcgccgcagccgaacgaccgagcgcagcgagtcagtgagcgaggaagcggaagagcgcctgatgcggtattttctccttacgcatctgtgcggtatttcacaccgcatatggtgcactctcagtacaatctgctctgatgccgcatagttaagccagtatacaggctctccttcacgatcaacgatcggcatggggccttcgtgcttgttgagtaatgttatcgctcccatcagagcacgcttggtactccgggaatcggatggtctgtcgatcatccaaaaaacgctcatgttttcaacctattaggtctgtggtcagctgaccacagaccatcctgctccatactcgctaattctagccaaaccgcaacgtcccctgcccgctagccttcaagagcgccattatcatcgggccaagtgaaaacttcccgagctcgctccgccgtgtcagatctcggagatagcccccgggcgaattgatgaagttcgctcgctccaaaatgcacgccatcgctgctgccgcattctccggtcccattgcctcacacgcgtcttggtaagccgacgggctgacccccagcatagaccgaaccaccaccgcagccgacatgaggtcacgccagctagcaaccgcaccgctcggcccataattgccaatggtcgggcatgctttcaggatcatcccgagggggaacgcttttatcggctcgctccttgcccggtctatttcactcggcttagcgccctgctccttttcagagcgaggttcaagttcattaacggattcgggttttgaattctgtatgtgctgctcgctctgggcagcattggtgctattattttctgaattgtctctaatttccaaccggttgattatctcttcctggagcatccacatctcttcgagaattgactctacatcagcaagcgtcggggcgcgtggaattctacccacaagttccacatagacttcctcgacagcttgccagtcgccctccgctccctcttccatagctgccgtaattagcttccgaacgtcccgtcggcaaatcgtcagactttctttggccatcctgaatgctgctcgatcggccatcacttgctgtgccatcatcgctagctcttcggaccgcgcgagaagcggagacaaatcgaagccaaacgcgcgctcgatctgaccagcgccatccttacgagcgtaacgctttccgttggcgctatccttccggacgatcaagcctgactccacgagcatggcgatgtgcctacgcaaagtcgcgccagccatcccatgcgcccgaagggcaagctgagcattcgacgggaagacgatcagctgtgcctcctgacgcaactccgtttccgggtgaaagctcaatagcgcatcaaggacggcaagactgttggactggattccaagtagttccatggccgcggacgcatctctaaagaccttccacttgtccgctgtcttgccttgtttgatatcggccagcgccgtctggcgccgcacaagcgcaagcgtcattggccgccgcccgaatggcgtcgttacacttcctgtctgcatcatctttcacctttcagcaggcaaaggaaatcagctcaccaaaacggcgctaaaaactcttgacgaggattcgaggaaatgcgattctgttcgcgctagagagacagaagggcttccgcgacggcgacgttgagggggctcttttcttttgcggtttactctccccgtttccgttggttctcagcgtggtacgcttgatacagcgctggcacatgatcgagcacgaaggtcgcaaaatcgggcgtcgccttcctgtcaatcgtgatttccagtttggccttgctctgcgtcacctgtgcaattctggtgccgtctggggtggccatgacctcgggaagtccacgcgcaacccgactgggcttcagactagcgatcaccgccttgaatcgttctgccgatggcagcgcttgaacttcctccgacatagcatatttagccacgtcggccggtgaagaaactttctcaatcagctcggcaagttgttgccaactcggccgtccaacaccaggagcggcaccaatagcatcggtcagttcagaggggagggcgtcgacgagcagaagcatcttggacaaattgctcttgtcgatcgacatcgcggcgatgacaatctctcgagaaaactgcctgttcaggcgatgtgcgaagcgcgccttttcgatgaaggtaagatcttcgcgctcattgttttcctgaccctgtgctacgaccacttgctcgtccgtcagttcgcgaacgaccgctctgaccggaagtccgagttctgaaacggcgcgtagccggcggtggccgaaggcaacctgatatcggcccggctggctcggatgcggtcgcacaaggattgggacttgctgtccttgttcccggatcgaagtaaggagcccgtcaatgtcccctcgcatacgatcctgcacgaaagacggttctattgacgaggcatccaactctatcactgcctgaccttcagcgaggcgccgctcgatctcttcggcacggctaagacgatcgttttgctctcgcagtgcgttaccaatgttcgctgtgagcttcgttgccggatcgcgctccttccttgttacgccgaggagcggcatggagcggttctttgccgtcctattgtcggcgggcgacgtttcaggggcgtcagttgacacgccaaggatgtgcttccggctcatgtgggcctaccccatgcttttttgatcagtgtttcgatctcgtcgttgacggcgttcatcgcctccaaggctcgatcataggtcgagcgcgtgaacaggccacgctccacttcgaatagagtctggtttgtcaggccagcgtccgaaaccgcggtggttttaagcatcggaaaattgaggacattttcgccaaaaatcgaccgcagataacctaccatttggttctgtggtccgtcgctcggttcgaaacgggttatcagatagcgcatccaattaaacttgaacttggcgccagcattctcgatttcacgcaaaaggttcgatgtcattgccagaaactggttcatcgacatcacatccagcatctgcggatggaccgtgacaagaatggacgtcgccgcagtcaatgcggatagcgtgagatacccaagctggggagggcagtcgatgaccacgacgtcatagttatccgcgatatcttcaattacttggctgatgcgaccataaaagagcgtgtcgccctctttgcggttcatcagcgcgcgtggcgtatcgtgttcaaactccatcagctcaaggttaccaggaatcaggtggaggtcgggaatgtaagtccctcggacgactcgttcgattgccacttgctcatcatcataccttatagcgccgtagagcgtttcgttcgggccaacgtccgtttccggttggctcccaaagagtgcagaaaggctcgcttgaggatcgagatcaatggccaagactcgatatccgcgcatagcgaggtactgcgccagatgcgcggcggtggtggtcttacccgacccacctttgaaattcatcacagagataacctgaagctgctcgccgcctcgacgatgtggcaggtagcgccggttcccgcggccgacctgatccatatacttccgaatcacatggatatcttcaattgagaacattcgcctgccacccgggctcatgctaacattcaactctggcatctcagacgcggtctgccgtaaatatgactcgccaacgccgagcagcttggacgcctccgatggcccgaatgttcgaatgcccttctcggaatgcggcgggaaaaccttaagatgatgtgcttgaagttggctcgagagggcatcggcatgacgctccatcaaggccgtcaaccctacaactacaggcgctgcttttaggacagacttcgccatctcaaacccattccttgccagtggcgatatttttcgcgaaactggaaaagttccgccgctggcaattagcgccgattctgctgtttgggcaagagcttttaggttaacagaaggttaacgccctcaggtcgaaaaactccacccaactgttatttgtatttatttccaatgccttagagagattgccatttgaatatgttcatgtattgttttagtgataatcctacaatcgtaacccaaaaagaggtcgccctctgcgcgccgtcgtccaatataggcgaagtcacccttgcgactcaggcggattctaccttgtacacgtgtcgagtggaaaagtcccatgtggatcactccgttgccccgtcgctcaccgtgttggggggaaggtgcacatggctcagttctcaatggaaattatctgcctaaccggctcagttctgcgtagaaaccaacatgcaagctccaccgggtgcaaagcggcagcggcggcaggatatattcaattgtaaatggcttcatgtccgggaaatctacatggatcagcaatgagtatgatggtcaatatggagaaaaagaaagagtaattaccaattttttttcaattcaaaaatgtagatgtccgcagcgttattataaaatgaaagtacattttgataaaacgacaaattacgatccgtcgtatttataggcgaaagcaataaacaaattattctaattcggaaatctttatttcgacgtgtctacattcacgtccaaatgggggcttagatgagaaacttcacgatcgatgcggccctgccggcgcgccactagtcaacaattggccaatctttgttctaaattgctaataaacgaccatttccgtcaattctccttggttgcaacagtctacccgtcaaatgtttactaatttataagtgtgaagtttgaattatgaaagacgaaatcgtattaaaaattcacaagaataaacaactccatagattttcaaaaaaacagtcacgagaaaaaaaccacagtccgtttgtctgctcttctagtttttattatttttctattaatagttttttgttatttcgagaataaaatttgaacgatgtccgaaccacaaaagccgagccgataaatcctaagccgagcctaactttagccgtaaccatcagtcacggctcccgggctaattcatttgaaccgaatcataatcaacggtttagatcaaactcaaaacaatctaacggcaacatagacgcgtcggtgagctaaaaagagtgtgaaagccaggtcaccatagcattgtctctcccagattttttatttgggaaataatagaagaaatagaaaaaaataaaagagtgagaaaaatcgtagagctatatattcgcacatgtactcgtttcgctttccttagtgttagctgctgccgctgttgtttctcctccatttctctatctttctctctcgctgcttctcgaatcttctgtatcatcttcttcttcttcaaggtgagtctctagatccgttcgcttgattttgctgctcgttagtcgttattgttgattctctatgccgatttcgctagatctgtttagcatgcgttgtggttttatgagaaaatctttgttttgggggttgcttgttatgtgattcgatccgtgcttgttggatcgatctgagctaattcttaaggtttatgtgttagatctatggagtttgaggattcttctcgcttctgtcgatctctcgctgttatttttgtttttttcagtgaagtgaagttgtttagttcgaaatgacttcgtgtatgctcgattgatctggttttaatcttcgatctgttaggtgttgatgtttacaagtgaattctagtgttttctcgttgagatctgtgaagtttgaacctagttttctcaataatcaacatatgaagcgatgtttgagtttcaataaacgctgctaatcttcgaaactaagttgtgatctgattcgtgtttacttcatgagcttatccaattcatttcggtttcattttactttttttttagtgaaccatggcgcaagttagcagaatctgcaatggtgtgcagaacccatctcttatctccaatctctcgaaatccagtcaacgcaaatctcccttatcggtttctctgaagacgcagcagcatccacgagcttatccgatttcgtcgtcgtggggattgaagaagagtgggatgacgttaattggctctgagcttcgtcctcttaaggtcatgtcttctgtttccacggcgtgcatgggggaagcggtgatcgccgaagtatcgactcaactatcagaggtagttggcgtcatcgagcgccatctcgaaccgacgttgctggccgtacatttgtacggctccgcagtggatggcggcctgaagccacacagtgatattgatttgctggttacggtgaccgtaaggcttgatgaaacaacgcggcgagctttgatcaacgaccttttggaaacttcggcttcccctggagagagcgagattctccgcgctgtagaagtcaccattgttgtgcacgacgacatcattccgtggcgttatccagctaagcgcgaactgcaatttggagaatggcagcgcaatgacattcttgcaggtatcttcgagccagccacgatcgacattgatctggctatcttgctgacaaaagcaagagaacatagcgttgccttggtaggtccagcggcggaggaactctttgatccggttcctgaacaggatctatttgaggcgctaaatgaaaccttaacgctatggaactcgccgcccgactgggctggcgatgagcgaaatgtagtgcttacgttgtcccgcatttggtacagcgcagtaaccggcaaaatcgcgccgaaggatgtcgctgccgactgggcaatggagcgcctgccggcccagtatcagcccgtcatacttgaagctagacaggcttatcttggacaagaagaagatcgcttggcctcgcgcgcagatcagttggaagaatttgtccactacgtgaaaggcgagatcaccaaggtagtcggcaaataaggatcaattcccgatcgttcaaacatttggcaataaagtttcttaagattgaatcctgttgccggtcttgcgatgattatcatataatttctgttgaattacgttaagcatgtaataattaacatgtaatgcatgacgttatttatgagatgggtttttatgattagagtcccgcaattatacatttaatacgcgatagaaaacaaaatatagcgcgcaaactaggataaattatcgcgcgcggtgtcatctatgttactagatcacgcgtgtatgcaatatcctgcagggtattaattaattatgccctaagacatcctggaccaatatgctgaagattatgctacctacaccaggataggacttgaagcacttaaccttgaagattggttcgaagaaccagaacccgatccacctaaccctgtggaccgccagaggatagaggacatcctggacctactgaacgtcagcaatgacgactgaaagattcccaggacaccggcggaagtggtggacccagtctaggtgcgatgcttagtcgcgcacgatgactatgtcggaaggcatctttgctttcggcaaactttagtaatactttaaggaaagtattgtacaagttaggtgcagagacaataatgcacccagctttagctttgtttatggaattattgtgtcggttgcattattggatgcctgcgtgcaccctaagcaatcaacggagaaacaaagataaaaatcaattactcacatgaaagagtattgatcacgagtcactatggagcgacaatctccagacaggatgtcagcatcttatcttcctttgaagaaagcatcatcaataacgatgtaatggtggggacatccactaagttattgctctgcaaacagctcaaaaagctactggccgacaatcataattgctcggcatgtccaggtggggcctccactagcaataatacaagctttacagcttgcagtgactcatcctccaataatggagaaaaagacgtcagcagtgacgaacaagggtcgaaagacttgcctatataagggcattctcccctcagttgaagatcatcgaaagttggagcaataaactctctcttcaacaaatctatcttttatcttttatcgccgcaagccaccatggcgggatctaagaagagaagaattaaacaagattccaagctggagaagtttacaaactgttacagcctctccaaaaccctcaggtttaaagcgatcccggtgggcaagacccaggagaacatcgacaacaagaggctcctggtggaagacgagaagcgcgccgaagactacaagggcgtgaagaagctgctcgataggtactacctcagctttattaacgacgtgctgcacagcatcaaactcaagaatctcaacaactacatctccctcttccgcaaaaagacccgcaccgagaaggagaacaaggagctggagaacctggagatcaacctccgcaaggaaatcgccaaagcgttcaagggcaatgaagggtacaagagcctcttcaagaaagacatcatcgaaactatcctcccagagtttctcgatgacaaggacgagatcgcgctggtgaactcctttaacgggttcacaaccgcgtttaccggcttctttgataacagggaaaatatgttctccgaggaggccaagtccaccagcatcgccttcaggtgtatcaacgagaacctcacccgctacatttccaatatggacattttcgagaaggtggatgcgatcttcgataagcacgaggtgcaggagatcaaagagaagattctcaattccgattatgacgtcgaggatttcttcgaaggggagttctttaattttgtgctcacacaagagggcattgacgtgtacaacgcgattatcgggggcttcgtcacagagtccggggagaagattaaggggctgaatgagtacatcaatctgtacaatcagaagaccaagcagaaactgccgaaattcaagccgctctacaagcaagtcctgtccgatagggaaagcctctccttctacggcgagggctataccagcgacgaggaggtgctggaagtcttccgcaacacactgaataagaatagcgagattttctcctccatcaagaagctcgagaagctctttaagaactttgacgagtacagctccgccgggattttcgtgaagaacgggccggcgatcagcaccatctccaaggacatctttggcgagtggaacgtcatcagggacaagtggaacgccgagtacgacgacatccacctgaagaagaaggcggtggtgaccgagaagtatgaggacgatcgcaggaagtccttcaaaaaaatcggctccttcagcctcgaacagctccaggagtatgccgatgcggatctgtccgtcgtcgagaagctgaaggaaatcatcattcagaaggtcgacgagatctataaagtgtacgggtccagcgagaagctgttcgacgccgactttgtgctcgagaagtccctcaaaaagaatgacgccgtggtggccattatgaaagacctgctcgactccgtgaagtccttcgaaaattacattaaagcgttctttggggaggggaaggaaactaacagggatgagtccttctatggcgactttgtcctcgcgtacgacatcctgctgaaggtcgaccacatttacgacgcgatccgcaactacgtgacacagaagccgtactccaaagacaagttcaagctgtacttccagaacccgcaatttatgcgcggctgggacaaggataaagagacagactaccgcgcgacaattctccgctatggctccaaatactatctggccatcatggacaagaagtacgcgaagtgcctgcagaagatcgacaaagacgacgtcaatggcaactatgaaaagatcaactacaagctgctgccgggcccgaacaagatgctcccgagggtgttcttcagcaagaagtggatggcctactacaatccaagcgaggatattcagaaaatctataaaaacgggaccttcaagaagggggacatgtttaacctcaacgactgccacaagctcattgatttcttcaaggatagcatttcccgctacccgaaatggtccaatgcgtacgattttaacttctccgagacagaaaagtacaaagacatcgcgggcttttacagggaggtggaggagcaagggtataaagtttcttttgaatccgcgagcaagaaggaagtcgacaagctcgtcgaggagggcaagctctacatgttccaaatttataacaaggacttttccgacaagagccatgggaccccaaacctccacaccatgtacttcaaactgctctttgacgagaacaaccacgggcaaatcaggctgagcggcggcgccgaattattcatgcgcagggcctccctcaagaaggaagagctggtcgtccatccagccaattccccgatcgcgaacaagaacccggacaatccgaaaaagaccaccaccctgtcctacgacgtctacaaggacaaacgcttcagcgaagaccagtacgaattacacatcccaattgcgattaataagtgcccaaagaatatcttcaaaattaatacagaggtcagggtgctgctcaaacacgacgacaatccgtatgtcatcggcattgacaggggcgagcgcaatctgctctatatcgtggtcgtggatgggaagggcaatattgtggagcagtactccctgaacgagattatcaacaacttcaatgggattaggattaagaccgactatcacagcctgctcgacaagaaagaaaaagagaggtttgaggcccgccaaaactggacctccattgagaatatcaaagaattaaaggccggctatatttcccaagtcgtccacaagatctgcgagctggtggagaaatatgacgccgtgattgcgctcgaagacttaaattctgggttcaagaactcccgcgtgaaggtggaaaaacaggtgtatcagaaattcgagaaaatgctgatcgacaaactcaattatatggtggataagaagtccaacccgtgtgccacagggggcgcgctgaagggctatcagatcaccaacaagttcgagagcttcaagagcatgagcacccagaacgggtttattttctacatcccggcgtggctcacctccaagattgacccgagcaccggcttcgtgaacctcctgaagacaaagtatacctccattgccgacagcaagaagtttatctcctccttcgaccgcattatgtatgtgccggaggaggacctcttcgagttcgccctcgactacaaaaacttcagccgcacagatgcggattacatcaagaagtggaagctgtactcctacgggaacaggatccgcatcttcaggaatccaaaaaaaaataacgtctttgactgggaggaagtgtgcctgacatccgcctacaaggaactgttcaataaatacggcatcaattaccagcagggcgacattcgcgccctcctctgtgagcagtccgacaaagcgttttactccagcttcatggccctcatgtccctgatgctccaaatgaggaatagcatcacagggcgcaccgacgtcgacttcctcatcagcccggtgaagaactccgacgggatcttttacgactcccgcaactatgaggcgcaagagaatgcgatcctcccgaagaacgccgatgcgaacggggcctataatatcgccaggaaagtgctctgggccatcgggcagttcaaaaaggcggaggatgagaagctcgacaaggtgaaaattgccatttccaacaaggagtggctggagtacgcgcagacctccgtgaagcacggatctaagaagagaagaattaaacaagattgaatagaagggctctctgtcatgatttcatactttcattattgagctctgtaattacaattatgaccatgagaacatctcttattgtgtggccttttaattgctgatgttagtactgaaccaaagcttatcgtgatgatgtaaaagcaataagtacttgtttgtagcttctttgtgtctccctttgggcttaatacatctgtttagtgttgtggctttggcatagacttctcttggtaataatgccttgcaatgcaaaatttcaattatcaaattctattatgttctcaccttatggtaacagcttaccctgtggaagatgagattcttgagttgagtcattgccaatttttggcattagcttttgaattagtgaattttgacaaaaattaccgtgacactgattttgttgaagctcttaagtgtagtttttacaaaatttcagtggctcgttgtgattatgtcaaactcacggcgaatgtagttcttacagaatttcagtggctcaaggatttaacgcgtgtatgcggccgcaaactatatcctgcagggtattaattaattatgccaatctgtgaagagtttattcacgattaatctaggaggaagcgcgctttgttggctgtaggcccaaagcagcaatcaacagagtgtgtgagggccagctgctggaaggttcggttttttcaacaggcccacacgcgcgggctgggctgggctgggctggccacgttccttcggtagcagttcggtggagcaacgaggacggtggaatcgaagtttagtaccacctcggctgaagatacggagaaagaccagtttataacctgcctctggagcctgctgctcggtttcaaagattaaataatttctactaagtgtagattgatgaaccagcccgcacgattctaatttctactaagtgtagattactgtcactgttgctggtttggtaatttctactaagtgtagatcaagatacctgcccagcaagcagtaatttctactaagtgtagatagggaagccacgtgtcggcttcttaatttctactaagtgtagataaaatcccgccacgtggcacccttaatttctactaagtgtagatttttttttggatttaacgcgtgtatgcggccgcaacagagaaactagacctgcaggaaggcgccggcgctctcttaaggtagc

SEQ ID NO: 792 - DNA, 15531 bp, synthetic construct
  source 1..15531: mol_type = other DNA
aaggatccctgaaagcgacgttggatgttaacatctacaaattgccttttcttatcgaccatgtacgtaagcgcttacgtttttggtggacccttgaggaaactggtagctgttgtgggcctgtggactcaagatggatcattaatttccaccttcacctacgatggggggcatcgcaccggtgagtaatattgtacggctaagagcgaatttggcctgtagacctcaattgcgagctttctaatttcaaactattcgggcctaacttttggtgtgatgatgctgactggcaggatatataccgttgtaatttgagctcgtgtgaataagtcgctgtgtatgtttgtttgattgtttctgttggagtgcagcccatttcaccggacaagtcggctagattgatttagccctgatgaactgccgaggggaagccatcttgagcgcggaatgggaatggatttcgttgtacaacgacacgacagaacacccacgggaccgagcttcgaagctttaacgcttgagttaagccgcgccgcgaagcggcgtcggcttgaacgaattgttagacatcagaagaactcgtcaagaaggcgatagaaggcgatgcgctgcgaatcgggagcggcgataccgtaaagcacgaggaagcggtcagcccattcgccgccaagctcttcagcaatatcacgggtagccaacgctatgtcctgatagcggtccgccacacccagccggccacagtcgatgaatccagaaaagcggccattttccaccatgatattcggcaagcaggcatcgccatgggtcacgacgagatcctcgccgtcgggcatgcgcgccttgagcctggcgaacagttcggctggcgcgagcccctgatgctcttcgtccagatcatcctgatcgacaagaccggcttccatccgagtacgtgctcgctcgatgcgatgtttcgcttggtggtcgaatgggcaggtagccggatcaagcgtatgcagccgccgcattgcatcagccatgatggatactttctcggcaggagcaaggtgagatgacaggagatcctgccccggcacttcgcccaatagcagccagtcccttcccgcttcagtgacaacgtcgagcacagctgcgcaaggaacgcccgtcgtggccagccacgatagccgcgctgcctcgtcctgcagttcattcagggcaccggacaggtcggtcttgacaaaaagaaccgggcgcccctgcgctgacagccggaacacggcggcatcagagcagccgattgtctgttgtgcccagtcatagccgaatagcctctccacccaagcggccggagaacctgcgtgcaatccatcttgttcaatcatggctttgtttctccttcaatcattgactattgtcacgttattctgaatcgacgagaactcacatcaatctcaacaagcatctctgctcgcgaaattggtgttgtctcattaaaacgtgaccgtcaaagtctattcactaggacccaaatctctccaggtcccgcaagctagcttcgccgcccacgtttctctttcttctcatattcaattgtcaaaaaacagacctcatgaccaaaatcccttaacgtgagttttcgttccactgagcgtcagaccccgtagaaaagatcaaaggatcttcttgagatcctttttttctgcgcgtaatctgctgcttgcaaacaaaaaaaccaccgctaccagcggtggtttgtttgccggatcaagagctaccaactttttttccgaaggtaactggcttcagcagagcgcagataccaaatactgtccttctagtgtagccgtagttaggccaccacttcaagaactctgtagcaccgcctacatacctcgctctgctaatcctgttaccagtggctgctgccagtggcgataagtcgtgtcttaccgggttggactcaagacgatagttaccggataaggcgcagcggtcgggctgaacggggggttcgtgcacacagcccagcttggagcgaacgacctacaccgaactgagatacctacagcgtgagctatgagaaagcgccacgcttcccgaagggagaaaggcggacaggtatccggtaagcggcagggtcggaacaggagagcgcacgagggagcttccagggggaaacgcctggtatctttatagtcctgtcgggtttcgccacctctgacttgagcgtcgatttttgtgatgctcgtcaggggggcggagcctatggaaaaacgccagcaacgcggcctttttacggttcctggccttttgctggccttttgctcacatgttctttcctgcgttatcccctgattctgtggataaccgtattaccgcctttgagtgagctgataccgctcgccgcagccgaacgaccgagcgcagcgagtcagtgagcgaggaagcggaagagcgcctgatgcggtattttctccttacgcatctgtgcggtatttcacaccgcatatggtgcactctcagtacaatctgctctgatgccgcatagttaagccagtatacaggctctccttcacgatcaacgatcggcatggggccttcgtgcttgttgagtaatgttatcgctcccatcagagcacgcttggtactccgggaatcggatggtctgtcgatcatccaaaaaacgctcatgttttcaacctattaggtctgtggtcagctgaccacagaccatcctgctccatactcgctaattctagccaaaccgcaacgtcccctgcccgctagccttcaagagcgccattatcatcgggccaagtgaaaacttcccgagctcgctccgccgtgtcagatctcggagatagcccccgggcgaattgatgaagttcgctcgctccaaaatgcacgccatcgctgctgccgcattctccggtcccattgcctcacacgcgtcttggtaagccgacgggctgacccccagcatagaccgaaccaccaccgcagccgacatgaggtcacgccagctagcaaccgcaccgctcggcccataattgccaatggtcgggcatgctttcaggatcatcccgagggggaacgcttttatcggctcgctccttgcccggtctatttcactcggcttagcgccctgctccttttcagagcgaggttcaagttcattaacggattcgggttttgaattctgtatgtgctgctcgctctgggcagcattggtgctattattttctgaattgtctctaatttccaaccggttgattatctcttcctggagcatccacatctcttcgagaattgactctacatcagcaagcgtcggggcgcgtggaattctacccacaagttccacatagacttcctcgacagcttgccagtcgccctccgctccctcttccatagctgccgtaattagcttccgaacgtcccgtcggcaaatcgtcagactttctttggccatcctgaatgctgctcgatcggccatcacttgctgtgccatcatcgctagctcttcggaccgcgcgagaagcggagacaaatcgaagccaaacgcgcgctcgatctgaccagcgccatccttacgagcgtaacgctttccgttggcgctatccttccggacgatcaagcctgactccacgagcatggcgatgtgcctacgcaaagtcgcgccagccatcccatgcgcccgaagggcaagctgagcattcgacgggaagacgatcagctgtgcctcctgacgcaactccgtttccgggtgaaagctcaatagcgcatcaaggacggcaagactgttggactggattccaagtagttccatggccgcggacgcatctctaaagaccttccacttgtccgctgtcttgccttgtttgatatcggccagcgccgtctggcgccgcacaagcgcaagcgtcattggccgccgcccgaatggcgtcgttacacttcctgtctgcatcatctttcacctttcagcaggcaaaggaaatcagctcaccaaaacggcgctaaaaactcttgacgaggattcgaggaaatgcgattctgttcgcgctagagagacagaagggcttccgcgacggcgacgttgagggggctcttttcttttgcggtttactctccccgtttccgttggttctcagcgtggtacgcttgatacagcgctggcacatgatcgagcacgaaggtcgcaaaatcgggcgtcgccttcctgtcaatcgtgatttccagtttggccttgctctgcgtcacctgtgcaattctggtgccgtctggggtggccatgacctcgggaagtccacgcgcaacccgactgggcttcagactagcgatcaccgccttgaatcgttctgccgatggcagcgcttgaacttcctccgacatagcatatttagccacgtcggccggtgaagaaactttctcaatcagctcggcaagttgttgccaactcggccgtccaacaccaggagcggcaccaatagcatcggtcagttcagaggggagggcgtcgacgagcagaagcatcttggacaaattgctcttgtcgatcgacatcgcggcgatgacaatctctcgagaaaactgcctgttcaggcgatgtgcgaagcgcgccttttcgatgaaggtaagatcttcgcgctcattgttttcctgaccctgtgctacgaccacttgctcgtccgtcagttcgcgaacgaccgctctgaccggaagtccgagttctgaaacggcgcgtagccggcggtggccgaaggcaacctgatatcggcccggctggctcggatgcggtcgcacaaggattgggacttgctgtccttgttcccggatcgaagtaaggagcccgtcaatgtcccctcgcatacgatcctgcacgaaagacggttctattgacgaggcatccaactctatcactgcctgaccttcagcgaggcgccgctcgatctcttcggcacggctaagacgatcgttttgctctcgcagtgcgttaccaatgttcgctgtgagcttcgttgccggatcgcgctccttccttgttacgccgaggagcggcatggagcggttctttgccgtcctattgtcggcgggcgacgtttcaggggcgtcagttgacacgccaaggatgtgcttccggctcatgtgggcctaccccatgcttttttgatcagtgtttcgatctcgtcgttgacggcgttcatcgcctccaaggctcgatcataggtcgagcgcgtgaacaggccacgctccacttcgaatagagtctggtttgtcaggccagcgtccgaaaccgcggtggttttaagcatcggaaaattgaggacattttcgccaaaaatcgaccgcagataacctaccatttggttctgtggtccgtcgctcggttcgaaacgggttatcagatagcgcatccaattaaacttgaacttggcgccagcattctcgatttcacgcaaaaggttcgatgtcattgccagaaactggttcatcgacatcacatccagcatctgcggatggaccgtgacaagaatggacgtcgccgcagtcaatgcggatagcgtgagatacccaagctggggagggcagtcgatgaccacgacgtcatagttatccgcgatatcttcaattacttggctgatgcgaccataaaagagcgtgtcgccctctttgcggttcatcagcgcgcgtggcgtatcgtgttcaaactccatcagctcaaggttaccaggaatcaggtggaggtcgggaatgtaagtccctcggacgactcgttcgattgccacttgctcatcatcataccttatagcgccgtagagcgtttcgttcgggccaacgtccgtttccggttggctcccaaagagtgcagaaaggctcgcttgaggatcgagatcaatggccaagactcgatatccgcgcatagcgaggtactgcgccagatgcgcggcggtggtggtcttacccgacccacctttgaaattcatcacagagataacctgaagctgctcgccgcctcgacgatgtggcaggtagcgccggttcccgcggccgacctgatccatatacttccgaatcacatggatatcttcaattgagaacattcgcctgccacccgggctcatgctaacattcaactctggcatctcagacgcggtctgccgtaaatatgactcgccaacgccgagcagcttggacgcctccgatggcccgaatgttcgaatgcccttctcggaatgcggcgggaaaaccttaagatgatgtgcttgaagttggctcgagagggcatcggcatgacgctccatcaaggccgtcaaccctacaactacaggcgctgcttttaggacagacttcgccatctcaaacccattccttgccagtggcgatatttttcgcgaaactggaaaagttccgccgctggcaattagcgccgattctgctgtttgggcaagagcttttaggttaacagaaggttaacgccctcaggtcgaaaaactccacccaactgttatttgtatttatttccaatgccttagagagattgccatttgaatatgttcatgtattgttttagtgataatcctacaatcgtaacccaaaaagaggtcgccctctgcgcgccgtcgtccaatataggcgaagtcacccttgcgactcaggcggattctaccttgtacacgtgtcgagtggaaaagtcccatgtggatcactccgttgccccgtcgctcaccgtgttggggggaaggtgcacatggctcagttctcaatggaaattatctgcctaaccggctcagttctgcgtagaaaccaacatgcaagctccaccgggtgcaaagcggcagcggcggcaggatatattcaattgtaaatggcttcatgtccgggaaatctacatggatcagcaatgagtatgatggtcaatatggagaaaaagaaagagtaattaccaattttttttcaattcaaaaatgtagatgtccgcagcgttattataaaatgaaagtacattttgataaaacgacaaattacgatccgtcgtatttataggcgaaagcaataaacaaattattctaattcggaaatctttatttcgacgtgtctacattcacgtccaaatgggggcttagatgagaaacttcacgatcgatgcggccctgccggcgcgccactagtcaacaattggccaatctttgttctaaattgctaataaacgaccatttccgtcaattctccttggttgcaacagtctacccgtcaaatgtttactaatttataagtgtgaagtttgaattatgaaagacgaaatcgtattaaaaattcacaagaataaacaactccatagattttcaaaaaaacagtcacgagaaaaaaaccacagtccgtttgtctgctcttctagtttttattatttttctattaatagttttttgttatttcgagaataaaatttgaacgatgtccgaaccacaaaagccgagccgataaatcctaagccgagcctaactttagccgtaaccatcagtcacggctcccgggctaattcatttgaaccgaatcataatcaacggtttagatcaaactcaaaacaatctaacggcaacatagacgcgtcggtgagctaaaaagagtgtgaaagccaggtcaccatagcattgtctctcccagattttttatttgggaaataatagaagaaatagaaaaaaataaaagagtgagaaaaatcgtagagctatatattcgcacatgtactcgtttcgctttccttagtgttagctgctgccgctgttgtttctcctccatttctctatctttctctctcgctgcttctcgaatcttctgtatcatcttcttcttcttcaaggtgagtctctagatccgttcgcttgattttgctgctcgttagtcgttattgttgattctctatgccgatttcgctagatctgtttagcatgcgttgtggttttatgagaaaatctttgttttgggggttgcttgttatgtgattcgatccgtgcttgttggatcgatctgagctaattcttaaggtttatgtgttagatctatggagtttgaggattcttctcgcttctgtcgatctctcgctgttatttttgtttttttcagtgaagtgaagttgtttagttcgaaatgacttcgtgtatgctcgattgatctggttttaatcttcgatctgttaggtgttgatgtttacaagtgaattctagtgttttctcgttgagatctgtgaagtttgaacctagttttctcaataatcaacatatgaagcgatgtttgagtttcaataaacgctgctaatcttcgaaactaagttgtgatctgattcgtgtttacttcatgagcttatccaattcatttcggtttcattttactttttttttagtgaaccatggcgcaagttagcagaatctgcaatggtgtgcagaacccatctcttatctccaatctctcgaaatccagtcaacgcaaatctcccttatcggtttctctgaagacgcagcagcatccacgagcttatccgatttcgtcgtcgtggggattgaagaagagtgggatgacgttaattggctctgagcttcgtcctcttaaggtcatgtcttctgtttccacggcgtgcatgggggaagcggtgatcgccgaagtatcgactcaactatcagaggtagttggcgtcatcgagcgccatctcgaaccgacgttgctggccgtacatttgtacggctccgcagtggatggcggcctgaagccacacagtgatattgatttgctggttacggtgaccgtaaggcttgatgaaacaacgcggcgagctttgatcaacgaccttttggaaacttcggcttcccctggagagagcgagattctccgcgctgtagaagtcaccattgttgtgcacgacgacatcattccgtggcgttatccagctaagcgcgaactgcaatttggagaatggcagcgcaatgacattcttgcaggtatcttcgagccagccacgatcgacattgatctggctatcttgctgacaaaagcaagagaacatagcgttgccttggtaggtccagcggcggaggaactctttgatccggttcctgaacaggatctatttgaggcgctaaatgaaaccttaacgctatggaactcgccgcccgactgggctggcgatgagcgaaatgtagtgcttacgttgtcccgcatttggtacagcgcagtaaccggcaaaatcgcgccgaaggatgtcgctgccgactgggcaatggagcgcctgccggcccagtatcagcccgtcatacttgaagctagacaggcttatcttggacaagaagaagatcgcttggcctcgcgcgcagatcagttggaagaatttgtccactacgtgaaaggcgagatcaccaaggtagtcggcaaataaggatcaattcccgatcgttcaaacatttggcaataaagtttcttaagattgaatcctgttgccggtcttgcgatgattatcatataatttctgttgaattacgttaagcatgtaataattaacatgtaatgcatgacgttatttatgagatgggtttttatgattagagtcccgcaattatacatttaatacgcgatagaaaacaaaatatagcgcgcaaactaggataaattatcgcgcgcggtgtcatctatgttactagatcacgcgtgtatgcaatatcctgcagggtattaattaattatgccctaagacatcctggaccaatatgctgaagattatgctacctacaccaggataggacttgaagcacttaaccttgaagattggttcgaagaaccagaacccgatccacctaaccctgtggaccgccagaggatagaggacatcctggacctactgaacgtcagcaatgacgactgaaagattcccaggacaccggcggaagtggtggacccagtctaggtgcgatgcttagtcgcgcacgatgactatgtcggaaggcatctttgctttcggcaaactttagtaatactttaaggaaagtattgtacaagttaggtgcagagacaataatgcacccagctttagctttgtttatggaattattgtgtcggttgcattattggatgcctgcgtgcaccctaagcaatcaacggagaaacaaagataaaaatcaattactcacatgaaagagtattgatcacgagtcactatggagcgacaatctccagacaggatgtcagcatcttatcttcctttgaagaaagcatcatcaataacgatgtaatggtggggacatccactaagttattgctctgcaaacagctcaaaaagctactggccgacaatcataattgctcggcatgtccaggtggggcctccactagcaataatacaagctttacagcttgcagtgactcatcctccaataatggagaaaaagacgtcagcagtgacgaacaagggtcgaaagacttgcctatataagggcattctcccctcagttgaagatcatcgaaagttggagcaataaactctctcttcaacaaatctatcttttatcttttatcgccgcaatggcgggatctaagaagagaagaattaaacaagatcgcaccgagaaggagaacaaggagctggagaacctggagatcaacctccgcaaggaaatcgccaaagcgttcaagggcaatgaagggtacaagagcctcttcaagaaagacatcatcgaaactatcctcccagagtttctcgatgacaaggacgagatcgcgctggtgaactcctttaacgggttcacaaccgcgtttaccggcttctttgataacagggaaaatatgttctccgaggaggccaagtccaccagcatcgccttcaggtgtatcaacgagaacctcacccgctacatttccaatatggacattttcgagaaggtggatgcgatcttcgataagcacgaggtgcaggagatcaaagagaagattctcaattccgattatgacgtcgaggatttcttcgaaggggagttctttaattttgtgctcacacaagagggcattgacgtgtacaacgcgattatcgggggcttcgtcacagagtccggggagaagattaaggggctgaatgagtacatcaatctgtacaatcagaagaccaagcagaaactgccgaaattcaagccgctctacaagcaagtcctgtccgatagggaaagcctctccttctacggcgagggctataccagcgacgaggaggtgctggaagtcttccgcaacacactgaataagaatagcgagattttctcctccatcaagaagctcgagaagctctttaagaactttgacgagtacagctccgccgggattttcgtgaagaacgggccggcgatcagcaccatctccaaggacatctttggcgagtggaacgtcatcagggacaagtggaacgccgagtacgacgacatccacctgaagaagaaggcggtggtgaccgagaagtatgaggacgatcgcaggaagtccttcaaaaaaatcggctccttcagcctcgaacagctccaggagtatgccgatgcggatctgtccgtcgtcgagaagctgaaggaaatcatcattcagaaggtcgacgagatctataaagtgtacgggtccagcgagaagctgttcgacgccgactttgtgctcgagaagtccctcaaaaagaatgacgccgtggtggccattatgaaagacctgctcgactccgtgaagtccttcgaaaattacattaaagcgttctttggggaggggaaggaaactaacagggatgagtccttctatggcgactttgtcctcgcgtacgacatcctgctgaaggtcgaccacatttacgacgcgatccgcaactacgtgacacagaagccgtactccaaagacaagttcaagctgtacttccagaacccgcaatttatgcgcggctgggacaaggataaagagacagactaccgcgcgacaattctccgctatggctccaaatactatctggccatcatggacaagaagtacgcgaagtgcctgcagaagatcgacaaagacgacgtcaatggcaactatgaaaagatcaactacaagctgctgccgggcccgaacaagatgctcccgagggtgttcttcagcaagaagtggatggcctactacaatccaagcgaggatattcagaaaatctataaaaacgggaccttcaagaagggggacatgtttaacctcaacgactgccacaagctcattgatttcttcaaggatagcatttcccgctacccgaaatggtccaatgcgtacgattttaacttctccgagacagaaaagtacaaagacatcgcgggcttttacagggaggtggaggagcaagggtataaagtttcttttgaatccgcgagcaagaaggaagtcgacaagctcgtcgaggagggcaagctctacatgttccaaatttataacaaggacttttccgacaagagccatgggaccccaaacctccacaccatgtacttcaaactgctctttgacgagaacaaccacgggcaaatcaggctgagcggcggcgccgaattattcatgcgcagggcctccctcaagaaggaagagctggtcgtccatccagccaattccccgatcgcgaacaagaacccggacaatccgaaaaagaccaccaccctgtcctacgacgtctacaaggacaaacgcttcagcgaagaccagtacgaattacacatcccaattgcgattaataagtgcccaaagaatatcttcaaaattaatacagaggtcagggtgctgctcaaacacgacgacaatccgtatgtcatcggcattgacaggggcgagcgcaatctgctctatatcgtggtcgtggatgggaagggcaatattgtggagcagtactccctgaacgagattatcaacaacttcaatgggattaggattaagaccgactatcacagcctgctcgacaagaaagaaaaagagaggtttgaggcccgccaaaactggacctccattgagaatatcaaagaattaaaggccggctatatttcccaagtcgtccacaagatctgcgagctggtggagaaatatgacgccgtgattgcgctcgaagacttaaattctgggttcaagaactcccgcgtgaaggtggaaaaacaggtgtatcagaaattcgagaaaatgctgatcgacaaactcaattatatggtggataagaagtccaacccgtgtgccacagggggcgcgctgaagggctatcagatcaccaacaagttcgagagcttcaagagcatgagcacccagaacgggtttattttctacatcccggcgtggctcacctccaagattgacccgagcaccggcttcgtgaacctcctgaagacaaagtatacctccattgccgacagcaagaagtttatctcctccttcgaccgcattatgtatgtgccggaggaggacctcttcgagttcgccctcgactacaaaaacttcagccgcacagatgcggattacatcaagaagtggaagctgtactcctacgggaacaggatccgcatcttcaggaatccaaaaaaaaataacgtctttgactgggaggaagtgtgcctgacatccgcctacaaggaactgttcaataaatacggcatcaattaccagcagggcgacattcgcgccctcctctgtgagcagtccgacaaagcgttttactccagcttcatggccctcatgtccctgatgctccaaatgaggaatagcatcacagggcgcaccgacgtcgacttcctcatcagcccggtgaagaactccgacgggatcttttacgactcccgcaactatgaggcgcaagagaatgcgatcctcccgaagaacgccgatgcgaacggggcctataatatcgccaggaaagtgctctgggccatcgggcagttcaaaaaggcggaggatgagaagctcgacaaggtgaaaattgccatttccaacaaggagtggctggagtacgcgcagacctccgtgaagcacggctcctctggcagctccggctctagcggctcctctggcagctccggctccaagctggagaagtttacaaactgttacagcctctccaaaaccctcaggtttaaagcgatcccggtgggcaagacccaggagaacatcgacaacaagaggctcctggtggaagacgagaagcgcgccgaagactacaagggcgtgaagaagctgctcgataggtactacctcagctttattaacgacgtgctgcacagcatcaaactcaagaatctcaacaactacatctccctcttccgcaaaaagaccggatctaagaagagaagaattaaacaagattgatagaagggctctctgtcatgatttcatactttcattattgagctctgtaattacaattatgaccatgagaacatctcttattgtgtggccttttaattgctgatgttagtactgaaccaaagcttatcgtgatgatgtaaaagcaataagtacttgtttgtagcttctttgtgtctccctttgggcttaatacatctgtttagtgttgtggctttggcatagacttctcttggtaataatgccttgcaatgcaaaatttcaattatcaaattctattatgttctcaccttatggtaacagcttaccctgtggaagatgagattcttgagttgagtcattgccaatttttggcattagcttttgaattagtgaattttgacaaaaattaccgtgacactgattttgttgaagctcttaagtgtagtttttacaaaatttcagtggctcgttgtgattatgtcaaactcacggcgaatgtagttcttacagaatttcagtggctcaaggatttaacgcgtgtatgcggccgcaaactatatcctgcagggtattaattaattatgccaatctgtgaagagtttattcacgattaatctaggaggaagcgcgctttgttggctgtaggcccaaagcagcaatcaacagagtgtgtgagggccagctgctggaaggttcggttttttcaacaggcccacacgcgcgggctgggctgggctgggctggccacgttccttcggtagcagttcggtggagcaacgaggacggtggaatcgaagtttagtaccacctcggctgaagatacggagaaagaccagtttataacctgcctctggagcctgctgctcggtttcaaagattaaataatttctactaagtgtagatggcagtgtactcagcaaaggttttaatttctactaagtgtagatgtaggatccttcttctcaacgtttaatttctactaagtgtagatttgctaccgacccagtgagtggttaatttctactaagtgtagatgttcaaggtttggtggaccactctaatttctactaagtgtagatgttcagaccttcaaatggaaacctaatttctactaagtgtagatttttttttggatttaacgcgtgtatgcggccgcaacagagaaactagacctgcaggaaggcgccggcgctctcttaaggtagc

SEQ ID NO: 793 - DNA, 15531 bp, synthetic construct
  source 1..15531: mol_type = other DNA
aaggatccctgaaagcgacgttggatgttaacatctacaaattgccttttcttatcgaccatgtacgtaagcgcttacgtttttggtggacccttgaggaaactggtagctgttgtgggcctgtggactcaagatggatcattaatttccaccttcacctacgatggggggcatcgcaccggtgagtaatattgtacggctaagagcgaatttggcctgtagacctcaattgcgagctttctaatttcaaactattcgggcctaacttttggtgtgatgatgctgactggcaggatatataccgttgtaatttgagctcgtgtgaataagtcgctgtgtatgtttgtttgattgtttctgttggagtgcagcccatttcaccggacaagtcggctagattgatttagccctgatgaactgccgaggggaagccatcttgagcgcggaatgggaatggatttcgttgtacaacgacacgacagaacacccacgggaccgagcttcgaagctttaacgcttgagttaagccgcgccgcgaagcggcgtcggcttgaacgaattgttagacatcagaagaactcgtcaagaaggcgatagaaggcgatgcgctgcgaatcgggagcggcgataccgtaaagcacgaggaagcggtcagcccattcgccgccaagctcttcagcaatatcacgggtagccaacgctatgtcctgatagcggtccgccacacccagccggccacagtcgatgaatccagaaaagcggccattttccaccatgatattcggcaagcaggcatcgccatgggtcacgacgagatcctcgccgtcgggcatgcgcgccttgagcctggcgaacagttcggctggcgcgagcccctgatgctcttcgtccagatcatcctgatcgacaagaccggcttccatccgagtacgtgctcgctcgatgcgatgtttcgcttggtggtcgaatgggcaggtagccggatcaagcgtatgcagccgccgcattgcatcagccatgatggatactttctcggcaggagcaaggtgagatgacaggagatcctgccccggcacttcgcccaatagcagccagtcccttcccgcttcagtgacaacgtcgagcacagctgcgcaaggaacgcccgtcgtggccagccacgatagccgcgctgcctcgtcctgcagttcattcagggcaccggacaggtcggtcttgacaaaaagaaccgggcgcccctgcgctgacagccggaacacggcggcatcagagcagccgattgtctgttgtgcccagtcatagccgaatagcctctccacccaagcggccggagaacctgcgtgcaatccatcttgttcaatcatggctttgtttctccttcaatcattgactattgtcacgttattctgaatcgacgagaactcacatcaatctcaacaagcatctctgctcgcgaaattggtgttgtctcattaaaacgtgaccgtcaaagtctattcactaggacccaaatctctccaggtcccgcaagctagcttcgccgcccacgtttctctttcttctcatattcaattgtcaaaaaacagacctcatgaccaaaatcccttaacgtgagttttcgttccactgagcgtcagaccccgtagaaaagatcaaaggatcttcttgagatcctttttttctgcgcgtaatctgctgcttgcaaacaaaaaaaccaccgctaccagcggtggtttgtttgccggatcaagagctaccaactttttttccgaaggtaactggcttcagcagagcgcagataccaaatactgtccttctagtgtagccgtagttaggccaccacttcaagaactctgtagcaccgcctacatacctcgctctgctaatcctgttaccagtggctgctgccagtggcgataagtcgtgtcttaccgggttggactcaagacgatagttaccggataaggcgcagcggtcgggctgaacggggggttcgtgcacacagcccagcttggagcgaacgacctacaccgaactgagatacctacagcgtgagctatgagaaagcgccacgcttcccgaagggagaaaggcggacaggtatccggtaagcggcagggtcggaacaggagagcgcacgagggagcttccagggggaaacgcctggtatctttatagtcctgtcgggtttcgccacctctgacttgagcgtcgatttttgtgatgctcgtcaggggggcggagcctatggaaaaacgccagcaacgcggcctttttacggttcctggccttttgctggccttttgctcacatgttctttcctgcgttatcccctgattctgtggataaccgtattaccgcctttgagtgagctgataccgctcgccgcagccgaacgaccgagcgcagcgagtcagtgagcgaggaagcggaagagcgcctgatgcggtattttctccttacgcatctgtgcggtatttcacaccgcatatggtgcactctcagtacaatctgctctgatgccgcatagttaagccagtatacaggctctccttcacgatcaacgatcggcatggggccttcgtgcttgttgagtaatgttatcgctcccatcagagcacgcttggtactccgggaatcggatggtctgtcgatcatccaaaaaacgctcatgttttcaacctattaggtctgtggtcagctgaccacagaccatcctgctccatactcgctaattctagccaaaccgcaacgtcccctgcccgctagccttcaagagcgccattatcatcgggccaagtgaaaacttcccgagctcgctccgccgtgtcagatctcggagatagcccccgggcgaattgatgaagttcgctcgctccaaaatgcacgccatcgctgctgccgcattctccggtcccattgcctcacacgcgtcttggtaagccgacgggctgacccccagcatagaccgaaccaccaccgcagccgacatgaggtcacgccagctagcaaccgcaccgctcggcccataattgccaatggtcgggcatgctttcaggatcatcccgagggggaacgcttttatcggctcgctccttgcccggtctatttcactcggcttagcgccctgctccttttcagagcgaggttcaagttcattaacggattcgggttttgaattctgtatgtgctgctcgctctgggcagcattggtgctattattttctgaattgtctctaatttccaaccggttgattatctcttcctggagcatccacatctcttcgagaattgactctacatcagcaagcgtcggggcgcgtggaattctacccacaagttccacatagacttcctcgacagcttgccagtcgccctccgctccctcttccatagctgccgtaattagcttccgaacgtcccgtcggcaaatcgtcagactttctttggccatcctgaatgctgctcgatcggccatcacttgctgtgccatcatcgctagctcttcggaccgcgcgagaagcggagacaaatcgaagccaaacgcgcgctcgatctgaccagcgccatccttacgagcgtaacgctttccgttggcgctatccttccggacgatcaagcctgactccacgagcatggcgatgtgcctacgcaaagtcgcgccagccatcccatgcgcccgaagggcaagctgagcattcgacgggaagacgatcagctgtgcctcctgacgcaactccgtttccgggtgaaagctcaatagcgcatcaaggacggcaagactgttggactggattccaagtagttccatggccgcggacgcatctctaaagaccttccacttgtccgctgtcttgccttgtttgatatcggccagcgccgtctggcgccgcacaagcgcaagcgtcattggccgccgcccgaatggcgtcgttacacttcctgtctgcatcatctttcacctttcagcaggcaaaggaaatcagctcaccaaaacggcgctaaaaactcttgacgaggattcgaggaaatgcgattctgttcgcgctagagagacagaagggcttccgcgacggcgacgttgagggggctcttttcttttgcggtttactctccccgtttccgttggttctcagcgtggtacgcttgatacagcgctggcacatgatcgagcacgaaggtcgcaaaatcgggcgtcgccttcctgtcaatcgtgatttccagtttggccttgctctgcgtcacctgtgcaattctggtgccgtctggggtggccatgacctcgggaagtccacgcgcaacccgactgggcttcagactagcgatcaccgccttgaatcgttctgccgatggcagcgcttgaacttcctccgacatagcatatttagccacgtcggccggtgaagaaactttctcaatcagctcggcaagttgttgccaactcggccgtccaacaccaggagcggcaccaatagcatcggtcagttcagaggggagggcgtcgacgagcagaagcatcttggacaaattgctcttgtcgatcgacatcgcggcgatgacaatctctcgagaaaactgcctgttcaggcgatgtgcgaagcgcgccttttcgatgaaggtaagatcttcgcgctcattgttttcctgaccctgtgctacgaccacttgctcgtccgtcagttcgcgaacgaccgctctgaccggaagtccgagttctgaaacggcgcgtagccggcggtggccgaaggcaacctgatatcggcccggctggctcggatgcggtcgcacaaggattgggacttgctgtccttgttcccggatcgaagtaaggagcccgtcaatgtcccctcgcatacgatcctgcacgaaagacggttctattgacgaggcatccaactctatcactgcctgaccttcagcgaggcgccgctcgatctcttcggcacggctaagacgatcgttttgctctcgcagtgcgttaccaatgttcgctgtgagcttcgttgccggatcgcgctccttccttgttacgccgaggagcggcatggagcggttctttgccgtcctattgtcggcgggcgacgtttcaggggcgtcagttgacacgccaaggatgtgcttccggctcatgtgggcctaccccatgcttttttgatcagtgtttcgatctcgtcgttgacggcgttcatcgcctccaaggctcgatcataggtcgagcgcgtgaacaggccacgctccacttcgaatagagtctggtttgtcaggccagcgtccgaaaccgcggtggttttaagcatcggaaaattgaggacattttcgccaaaaatcgaccgcagataacctaccatttggttctgtggtccgtcgctcggttcgaaacgggttatcagatagcgcatccaattaaacttgaacttggcgccagcattctcgatttcacgcaaaaggttcgatgtcattgccagaaactggttcatcgacatcacatccagcatctgcggatggaccgtgacaagaatggacgtcgccgcagtcaatgcggatagcgtgagatacccaagctggggagggcagtcgatgaccacgacgtcatagttatccgcgatatcttcaattacttggctgatgcgaccataaaagagcgtgtcgccctctttgcggttcatcagcgcgcgtggcgtatcgtgttcaaactccatcagctcaaggttaccaggaatcaggtggaggtcgggaatgtaagtccctcggacgactcgttcgattgccacttgctcatcatcataccttatagcgccgtagagcgtttcgttcgggccaacgtccgtttccggttggctcccaaagagtgcagaaaggctcgcttgaggatcgagatcaatggccaagactcgatatccgcgcatagcgaggtactgcgccagatgcgcggcggtggtggtcttacccgacccacctttgaaattcatcacagagataacctgaagctgctcgccgcctcgacgatgtggcaggtagcgccggttcccgcggccgacctgatccatatacttccgaatcacatggatatcttcaattgagaacattcgcctgccacccgggctcatgctaacattcaactctggcatctcagacgcggtctgccgtaaatatgactcgccaacgccgagcagcttggacgcctccgatggcccgaatgttcgaatgcccttctcggaatgcggcgggaaaaccttaagatgatgtgcttgaagttggctcgagagggcatcggcatgacgctccatcaaggccgtcaaccctacaactacaggcgctgcttttaggacagacttcgccatctcaaacccattccttgccagtggcgatatttttcgcgaaactggaaaagttccgccgctggcaattagcgccgattctgctgtttgggcaagagcttttaggttaacagaaggttaacgccctcaggtcgaaaaactccacccaactgttatttgtatttatttccaatgccttagagagattgccatttgaatatgttcatgtattgttttagtgataatcctacaatcgtaacccaaaaagaggtcgccctctgcgcgccgtcgtccaatataggcgaagtcacccttgcgactcaggcggattctaccttgtacacgtgtcgagtggaaaagtcccatgtggatcactccgttgccccgtcgctcaccgtgttggggggaaggtgcacatggctcagttctcaatggaaattatctgcctaaccggctcagttctgcgtagaaaccaacatgcaagctccaccgggtgcaaagcggcagcggcggcaggatatattcaattgtaaatggcttcatgtccgggaaatctacatggatcagcaatgagtatgatggtcaatatggagaaaaagaaagagtaattaccaattttttttcaattcaaaaatgtagatgtccgcagcgttattataaaatgaaagtacattttgataaaacgacaaattacgatccgtcgtatttataggcgaaagcaataaacaaattattctaattcggaaatctttatttcgacgtgtctacattcacgtccaaatgggggcttagatgagaaacttcacgatcgatgcggccctgccggcgcgccactagtcaacaattggccaatctttgttctaaattgctaataaacgaccatttccgtcaattctccttggttgcaacagtctacccgtcaaatgtttactaatttataagtgtgaagtttgaattatgaaagacgaaatcgtattaaaaattcacaagaataaacaactccatagattttcaaaaaaacagtcacgagaaaaaaaccacagtccgtttgtctgctcttctagtttttattatttttctattaatagttttttgttatttcgagaataaaatttgaacgatgtccgaaccacaaaagccgagccgataaatcctaagccgagcctaactttagccgtaaccatcagtcacggctcccgggctaattcatttgaaccgaatcataatcaacggtttagatcaaactcaaaacaatctaacggcaacatagacgcgtcggtgagctaaaaagagtgtgaaagccaggtcaccatagcattgtctctcccagattttttatttgggaaataatagaagaaatagaaaaaaataaaagagtgagaaaaatcgtagagctatatattcgcacatgtactcgtttcgctttccttagtgttagctgctgccgctgttgtttctcctccatttctctatctttctctctcgctgcttctcgaatcttctgtatcatcttcttcttcttcaaggtgagtctctagatccgttcgcttgattttgctgctcgttagtcgttattgttgattctctatgccgatttcgctagatctgtttagcatgcgttgtggttttatgagaaaatctttgttttgggggttgcttgttatgtgattcgatccgtgcttgttggatcgatctgagctaattcttaaggtttatgtgttagatctatggagtttgaggattcttctcgcttctgtcgatctctcgctgttatttttgtttttttcagtgaagtgaagttgtttagttcgaaatgacttcgtgtatgctcgattgatctggttttaatcttcgatctgttaggtgttgatgtttacaagtgaattctagtgttttctcgttgagatctgtgaagtttgaacctagttttctcaataatcaacatatgaagcgatgtttgagtttcaataaacgctgctaatcttcgaaactaagttgtgatctgattcgtgtttacttcatgagcttatccaattcatttcggtttcattttactttttttttagtgaaccatggcgcaagttagcagaatctgcaatggtgtgcagaacccatctcttatctccaatctctcgaaatccagtcaacgcaaatctcccttatcggtttctctgaagacgcagcagcatccacgagcttatccgatttcgtcgtcgtggggattgaagaagagtgggatgacgttaattggctctgagcttcgtcctcttaaggtcatgtcttctgtttccacggcgtgcatgggggaagcggtgatcgccgaagtatcgactcaactatcagaggtagttggcgtcatcgagcgccatctcgaaccgacgttgctggccgtacatttgtacggctccgcagtggatggcggcctgaagccacacagtgatattgatttgctggttacggtgaccgtaaggcttgatgaaacaacgcggcgagctttgatcaacgaccttttggaaacttcggcttcccctggagagagcgagattctccgcgctgtagaagtcaccattgttgtgcacgacgacatcattccgtggcgttatccagctaagcgcgaactgcaatttggagaatggcagcgcaatgacattcttgcaggtatcttcgagccagccacgatcgacattgatctggctatcttgctgacaaaagcaagagaacatagcgttgccttggtaggtccagcggcggaggaactctttgatccggttcctgaacaggatctatttgaggcgctaaatgaaaccttaacgctatggaactcgccgcccgactgggctggcgatgagcgaaatgtagtgcttacgttgtcccgcatttggtacagcgcagtaaccggcaaaatcgcgccgaaggatgtcgctgccgactgggcaatggagcgcctgccggcccagtatcagcccgtcatacttgaagctagacaggcttatcttggacaagaagaagatcgcttggcctcgcgcgcagatcagttggaagaatttgtccactacgtgaaaggcgagatcaccaaggtagtcggcaaataaggatcaattcccgatcgttcaaacatttggcaataaagtttcttaagattgaatcctgttgccggtcttgcgatgattatcatataatttctgttgaattacgttaagcatgtaataattaacatgtaatgcatgacgttatttatgagatgggtttttatgattagagtcccgcaattatacatttaatacgcgatagaaaacaaaatatagcgcgcaaactaggataaattatcgcgcgcggtgtcatctatgttactagatcacgcgtgtatgcaatatcctgcagggtattaattaattatgccctaagacatcctggaccaatatgctgaagattatgctacctacaccaggataggacttgaagcacttaaccttgaagattggttcgaagaaccagaacccgatccacctaaccctgtggaccgccagaggatagaggacatcctggacctactgaacgtcagcaatgacgactgaaagattcccaggacaccggcggaagtggtggacccagtctaggtgcgatgcttagtcgcgcacgatgactatgtcggaaggcatctttgctttcggcaaactttagtaatactttaaggaaagtattgtacaagttaggtgcagagacaataatgcacccagctttagctttgtttatggaattattgtgtcggttgcattattggatgcctgcgtgcaccctaagcaatcaacggagaaacaaagataaaaatcaattactcacatgaaagagtattgatcacgagtcactatggagcgacaatctccagacaggatgtcagcatcttatcttcctttgaagaaagcatcatcaataacgatgtaatggtggggacatccactaagttattgctctgcaaacagctcaaaaagctactggccgacaatcataattgctcggcatgtccaggtggggcctccactagcaataatacaagctttacagcttgcagtgactcatcctccaataatggagaaaaagacgtcagcagtgacgaacaagggtcgaaagacttgcctatataagggcattctcccctcagttgaagatcatcgaaagttggagcaataaactctctcttcaacaaatctatcttttatcttttatcgccgcaatggcgggatctaagaagagaagaattaaacaagatcgcaccgagaaggagaacaaggagctggagaacctggagatcaacctccgcaaggaaatcgccaaagcgttcaagggcaatgaagggtacaagagcctcttcaagaaagacatcatcgaaactatcctcccagagtttctcgatgacaaggacgagatcgcgctggtgaactcctttaacgggttcacaaccgcgtttaccggcttctttgataacagggaaaatatgttctccgaggaggccaagtccaccagcatcgccttcaggtgtatcaacgagaacctcacccgctacatttccaatatggacattttcgagaaggtggatgcgatcttcgataagcacgaggtgcaggagatcaaagagaagattctcaattccgattatgacgtcgaggatttcttcgaaggggagttctttaattttgtgctcacacaagagggcattgacgtgtacaacgcgattatcgggggcttcgtcacagagtccggggagaagattaaggggctgaatgagtacatcaatctgtacaatcagaagaccaagcagaaactgccgaaattcaagccgctctacaagcaagtcctgtccgatagggaaagcctctccttctacggcgagggctataccagcgacgaggaggtgctggaagtcttccgcaacacactgaataagaatagcgagattttctcctccatcaagaagctcgagaagctctttaagaactttgacgagtacagctccgccgggattttcgtgaagaacgggccggcgatcagcaccatctccaaggacatctttggcgagtggaacgtcatcagggacaagtggaacgccgagtacgacgacatccacctgaagaagaaggcggtggtgaccgagaagtatgaggacgatcgcaggaagtccttcaaaaaaatcggctccttcagcctcgaacagctccaggagtatgccgatgcggatctgtccgtcgtcgagaagctgaaggaaatcatcattcagaaggtcgacgagatctataaagtgtacgggtccagcgagaagctgttcgacgccgactttgtgctcgagaagtccctcaaaaagaatgacgccgtggtggccattatgaaagacctgctcgactccgtgaagtccttcgaaaattacattaaagcgttctttggggaggggaaggaaactaacagggatgagtccttctatggcgactttgtcctcgcgtacgacatcctgctgaaggtcgaccacatttacgacgcgatccgcaactacgtgacacagaagccgtactccaaagacaagttcaagctgtacttccagaacccgcaatttatgcgcggctgggacaaggataaagagacagactaccgcgcgacaattctccgctatggctccaaatactatctggccatcatggacaagaagtacgcgaagtgcctgcagaagatcgacaaagacgacgtcaatggcaactatgaaaagatcaactacaagctgctgccgggcccgaacaagatgctcccgagggtgttcttcagcaagaagtggatggcctactacaatccaagcgaggatattcagaaaatctataaaaacgggaccttcaagaagggggacatgtttaacctcaacgactgccacaagctcattgatttcttcaaggatagcatttcccgctacccgaaatggtccaatgcgtacgattttaacttctccgagacagaaaagtacaaagacatcgcgggcttttacagggaggtggaggagcaagggtataaagtttcttttgaatccgcgagcaagaaggaagtcgacaagctcgtcgaggagggcaagctctacatgttccaaatttataacaaggacttttccgacaagagccatgggaccccaaacctccacaccatgtacttcaaactgctctttgacgagaacaaccacgggcaaatcaggctgagcggcggcgccgaattattcatgcgcagggcctccctcaagaaggaagagctggtcgtccatccagccaattccccgatcgcgaacaagaacccggacaatccgaaaaagaccaccaccctgtcctacgacgtctacaaggacaaacgcttcagcgaagaccagtacgaattacacatcccaattgcgattaataagtgcccaaagaatatcttcaaaattaatacagaggtcagggtgctgctcaaacacgacgacaatccgtatgtcatcggcattgacaggggcgagcgcaatctgctctatatcgtggtcgtggatgggaagggcaatattgtggagcagtactccctgaacgagattatcaacaacttcaatgggattaggattaagaccgactatcacagcctgctcgacaagaaagaaaaagagaggtttgaggcccgccaaaactggacctccattgagaatatcaaagaattaaaggccggctatatttcccaagtcgtccacaagatctgcgagctggtggagaaatatgacgccgtgattgcgctcgaagacttaaattctgggttcaagaactcccgcgtgaaggtggaaaaacaggtgtatcagaaattcgagaaaatgctgatcgacaaactcaattatatggtggataagaagtccaacccgtgtgccacagggggcgcgctgaagggctatcagatcaccaacaagttcgagagcttcaagagcatgagcacccagaacgggtttattttctacatcccggcgtggctcacctccaagattgacccgagcaccggcttcgtgaacctcctgaagacaaagtatacctccattgccgacagcaagaagtttatctcctccttcgaccgcattatgtatgtgccggaggaggacctcttcgagttcgccctcgactacaaaaacttcagccgcacagatgcggattacatcaagaagtggaagctgtactcctacgggaacaggatccgcatcttcaggaatccaaaaaaaaataacgtctttgactgggaggaagtgtgcctgacatccgcctacaaggaactgttcaataaatacggcatcaattaccagcagggcgacattcgcgccctcctctgtgagcagtccgacaaagcgttttactccagcttcatggccctcatgtccctgatgctccaaatgaggaatagcatcacagggcgcaccgacgtcgacttcctcatcagcccggtgaagaactccgacgggatcttttacgactcccgcaactatgaggcgcaagagaatgcgatcctcccgaagaacgccgatgcgaacggggcctataatatcgccaggaaagtgctctgggccatcgggcagttcaaaaaggcggaggatgagaagctcgacaaggtgaaaattgccatttccaacaaggagtggctggagtacgcgcagacctccgtgaagcacggctcctctggcagctccggctctagcggctcctctggcagctccggctccaagctggagaagtttacaaactgttacagcctctccaaaaccctcaggtttaaagcgatcccggtgggcaagacccaggagaacatcgacaacaagaggctcctggtggaagacgagaagcgcgccgaagactacaagggcgtgaagaagctgctcgataggtactacctcagctttattaacgacgtgctgcacagcatcaaactcaagaatctcaacaactacatctccctcttccgcaaaaagaccggatctaagaagagaagaattaaacaagattgatagaagggctctctgtcatgatttcatactttcattattgagctctgtaattacaattatgaccatgagaacatctcttattgtgtggccttttaattgctgatgttagtactgaaccaaagcttatcgtgatgatgtaaaagcaataagtacttgtttgtagcttctttgtgtctccctttgggcttaatacatctgtttagtgttgtggctttggcatagacttctcttggtaataatgccttgcaatgcaaaatttcaattatcaaattctattatgttctcaccttatggtaacagcttaccctgtggaagatgagattcttgagttgagtcattgccaatttttggcattagcttttgaattagtgaattttgacaaaaattaccgtgacactgattttgttgaagctcttaagtgtagtttttacaaaatttcagtggctcgttgtgattatgtcaaactcacggcgaatgtagttcttacagaatttcagtggctcaaggatttaacgcgtgtatgcggccgcaaactatatcctgcagggtattaattaattatgccaatctgtgaagagtttattcacgattaatctaggaggaagcgcgctttgttggctgtaggcccaaagcagcaatcaacagagtgtgtgagggccagctgctggaaggttcggttttttcaacaggcccacacgcgcgggctgggctgggctgggctggccacgttccttcggtagcagttcggtggagcaacgaggacggtggaatcgaagtttagtaccacctcggctgaagatacggagaaagaccagtttataacctgcctctggagcctgctgctcggtttcaaagattaaataatttctactaagtgtagattgatgaaccagcccgcacgattctaatttctactaagtgtagattactgtcactgttgctggtttggtaatttctactaagtgtagatcaagatacctgcccagcaagcagtaatttctactaagtgtagatagggaagccacgtgtcggcttcttaatttctactaagtgtagataaaatcccgccacgtggcacccttaatttctactaagtgtagatttttttttggatttaacgcgtgtatgcggccgcaacagagaaactagacctgcaggaaggcgccggcgctctcttaaggtagc

SEQ ID NO: 794 - DNA, 15522 bp, synthetic construct
  source 1..15522: mol_type = other DNA
aaggatccctgaaagcgacgttggatgttaacatctacaaattgccttttcttatcgaccatgtacgtaagcgcttacgtttttggtggacccttgaggaaactggtagctgttgtgggcctgtggactcaagatggatcattaatttccaccttcacctacgatggggggcatcgcaccggtgagtaatattgtacggctaagagcgaatttggcctgtagacctcaattgcgagctttctaatttcaaactattcgggcctaacttttggtgtgatgatgctgactggcaggatatataccgttgtaatttgagctcgtgtgaataagtcgctgtgtatgtttgtttgattgtttctgttggagtgcagcccatttcaccggacaagtcggctagattgatttagccctgatgaactgccgaggggaagccatcttgagcgcggaatgggaatggatttcgttgtacaacgacacgacagaacacccacgggaccgagcttcgaagctttaacgcttgagttaagccgcgccgcgaagcggcgtcggcttgaacgaattgttagacatcagaagaactcgtcaagaaggcgatagaaggcgatgcgctgcgaatcgggagcggcgataccgtaaagcacgaggaagcggtcagcccattcgccgccaagctcttcagcaatatcacgggtagccaacgctatgtcctgatagcggtccgccacacccagccggccacagtcgatgaatccagaaaagcggccattttccaccatgatattcggcaagcaggcatcgccatgggtcacgacgagatcctcgccgtcgggcatgcgcgccttgagcctggcgaacagttcggctggcgcgagcccctgatgctcttcgtccagatcatcctgatcgacaagaccggcttccatccgagtacgtgctcgctcgatgcgatgtttcgcttggtggtcgaatgggcaggtagccggatcaagcgtatgcagccgccgcattgcatcagccatgatggatactttctcggcaggagcaaggtgagatgacaggagatcctgccccggcacttcgcccaatagcagccagtcccttcccgcttcagtgacaacgtcgagcacagctgcgcaaggaacgcccgtcgtggccagccacgatagccgcgctgcctcgtcctgcagttcattcagggcaccggacaggtcggtcttgacaaaaagaaccgggcgcccctgcgctgacagccggaacacggcggcatcagagcagccgattgtctgttgtgcccagtcatagccgaatagcctctccacccaagcggccggagaacctgcgtgcaatccatcttgttcaatcatggctttgtttctccttcaatcattgactattgtcacgttattctgaatcgacgagaactcacatcaatctcaacaagcatctctgctcgcgaaattggtgttgtctcattaaaacgtgaccgtcaaagtctattcactaggacccaaatctctccaggtcccgcaagctagcttcgccgcccacgtttctctttcttctcatattcaattgtcaaaaaacagacctcatgaccaaaatcccttaacgtgagttttcgttccactgagcgtcagaccccgtagaaaagatcaaaggatcttcttgagatcctttttttctgcgcgtaatctgctgcttgcaaacaaaaaaaccaccgctaccagcggtggtttgtttgccggatcaagagctaccaactttttttccgaaggtaactggcttcagcagagcgcagataccaaatactgtccttctagtgtagccgtagttaggccaccacttcaagaactctgtagcaccgcctacatacctcgctctgctaatcctgttaccagtggctgctgccagtggcgataagtcgtgtcttaccgggttggactcaagacgatagttaccggataaggcgcagcggtcgggctgaacggggggttcgtgcacacagcccagcttggagcgaacgacctacaccgaactgagatacctacagcgtgagctatgagaaagcgccacgcttcccgaagggagaaaggcggacaggtatccggtaagcggcagggtcggaacaggagagcgcacgagggagcttccagggggaaacgcctggtatctttatagtcctgtcgggtttcgccacctctgacttgagcgtcgatttttgtgatgctcgtcaggggggcggagcctatggaaaaacgccagcaacgcggcctttttacggttcctggccttttgctggccttttgctcacatgttctttcctgcgttatcccctgattctgtggataaccgtattaccgcctttgagtgagctgataccgctcgccgcagccgaacgaccgagcgcagcgagtcagtgagcgaggaagcggaagagcgcctgatgcggtattttctccttacgcatctgtgcggtatttcacaccgcatatggtgcactctcagtacaatctgctctgatgccgcatagttaagccagtatacaggctctccttcacgatcaacgatcggcatggggccttcgtgcttgttgagtaatgttatcgctcccatcagagcacgcttggtactccgggaatcggatggtctgtcgatcatccaaaaaacgctcatgttttcaacctattaggtctgtggtcagctgaccacagaccatcctgctccatactcgctaattctagccaaaccgcaacgtcccctgcccgctagccttcaagagcgccattatcatcgggccaagtgaaaacttcccgagctcgctccgccgtgtcagatctcggagatagcccccgggcgaattgatgaagttcgctcgctccaaaatgcacgccatcgctgctgccgcattctccggtcccattgcctcacacgcgtcttggtaagccgacgggctgacccccagcatagaccgaaccaccaccgcagccgacatgaggtcacgccagctagcaaccgcaccgctcggcccataattgccaatggtcgggcatgctttcaggatcatcccgagggggaacgcttttatcggctcgctccttgcccggtctatttcactcggcttagcgccctgctccttttcagagcgaggttcaagttcattaacggattcgggttttgaattctgtatgtgctgctcgctctgggcagcattggtgctattattttctgaattgtctctaatttccaaccggttgattatctcttcctggagcatccacatctcttcgagaattgactctacatcagcaagcgtcggggcgcgtggaattctacccacaagttccacatagacttcctcgacagcttgccagtcgccctccgctccctcttccatagctgccgtaattagcttccgaacgtcccgtcggcaaatcgtcagactttctttggccatcctgaatgctgctcgatcggccatcacttgctgtgccatcatcgctagctcttcggaccgcgcgagaagcggagacaaatcgaagccaaacgcgcgctcgatctgaccagcgccatccttacgagcgtaacgctttccgttggcgctatccttccggacgatcaagcctgactccacgagcatggcgatgtgcctacgcaaagtcgcgccagccatcccatgcgcccgaagggcaagctgagcattcgacgggaagacgatcagctgtgcctcctgacgcaactccgtttccgggtgaaagctcaatagcgcatcaaggacggcaagactgttggactggattccaagtagttccatggccgcggacgcatctctaaagaccttccacttgtccgctgtcttgccttgtttgatatcggccagcgccgtctggcgccgcacaagcgcaagcgtcattggccgccgcccgaatggcgtcgttacacttcctgtctgcatcatctttcacctttcagcaggcaaaggaaatcagctcaccaaaacggcgctaaaaactcttgacgaggattcgaggaaatgcgattctgttcgcgctagagagacagaagggcttccgcgacggcgacgttgagggggctcttttcttttgcggtttactctccccgtttccgttggttctcagcgtggtacgcttgatacagcgctggcacatgatcgagcacgaaggtcgcaaaatcgggcgtcgccttcctgtcaatcgtgatttccagtttggccttgctctgcgtcacctgtgcaattctggtgccgtctggggtggccatgacctcgggaagtccacgcgcaacccgactgggcttcagactagcgatcaccgccttgaatcgttctgccgatggcagcgcttgaacttcctccgacatagcatatttagccacgtcggccggtgaagaaactttctcaatcagctcggcaagttgttgccaactcggccgtccaacaccaggagcggcaccaatagcatcggtcagttcagaggggagggcgtcgacgagcagaagcatcttggacaaattgctcttgtcgatcgacatcgcggcgatgacaatctctcgagaaaactgcctgttcaggcgatgtgcgaagcgcgccttttcgatgaaggtaagatcttcgcgctcattgttttcctgaccctgtgctacgaccacttgctcgtccgtcagttcgcgaacgaccgctctgaccggaagtccgagttctgaaacggcgcgtagccggcggtggccgaaggcaacctgatatcggcccggctggctcggatgcggtcgcacaaggattgggacttgctgtccttgttcccggatcgaagtaaggagcccgtcaatgtcccctcgcatacgatcctgcacgaaagacggttctattgacgaggcatccaactctatcactgcctgaccttcagcgaggcgccgctcgatctcttcggcacggctaagacgatcgttttgctctcgcagtgcgttaccaatgttcgctgtgagcttcgttgccggatcgcgctccttccttgttacgccgaggagcggcatggagcggttctttgccgtcctattgtcggcgggcgacgtttcaggggcgtcagttgacacgccaaggatgtgcttccggctcatgtgggcctaccccatgcttttttgatcagtgtttcgatctcgtcgttgacggcgttcatcgcctccaaggctcgatcataggtcgagcgcgtgaacaggccacgctccacttcgaatagagtctggtttgtcaggccagcgtccgaaaccgcggtggttttaagcatcggaaaattgaggacattttcgccaaaaatcgaccgcagataacctaccatttggttctgtggtccgtcgctcggttcgaaacgggttatcagatagcgcatccaattaaacttgaacttggcgccagcattctcgatttcacgcaaaaggttcgatgtcattgccagaaactggttcatcgacatcacatccagcatctgcggatggaccgtgacaagaatggacgtcgccgcagtcaatgcggatagcgtgagatacccaagctggggagggcagtcgatgaccacgacgtcatagttatccgcgatatcttcaattacttggctgatgcgaccataaaagagcgtgtcgccctctttgcggttcatcagcgcgcgtggcgtatcgtgttcaaactccatcagctcaaggttaccaggaatcaggtggaggtcgggaatgtaagtccctcggacgactcgttcgattgccacttgctcatcatcataccttatagcgccgtagagcgtttcgttcgggccaacgtccgtttccggttggctcccaaagagtgcagaaaggctcgcttgaggatcgagatcaatggccaagactcgatatccgcgcatagcgaggtactgcgccagatgcgcggcggtggtggtcttacccgacccacctttgaaattcatcacagagataacctgaagctgctcgccgcctcgacgatgtggcaggtagcgccggttcccgcggccgacctgatccatatacttccgaatcacatggatatcttcaattgagaacattcgcctgccacccgggctcatgctaacattcaactctggcatctcagacgcggtctgccgtaaatatgactcgccaacgccgagcagcttggacgcctccgatggcccgaatgttcgaatgcccttctcggaatgcggcgggaaaaccttaagatgatgtgcttgaagttggctcgagagggcatcggcatgacgctccatcaaggccgtcaaccctacaactacaggcgctgcttttaggacagacttcgccatctcaaacccattccttgccagtggcgatatttttcgcgaaactggaaaagttccgccgctggcaattagcgccgattctgctgtttgggcaagagcttttaggttaacagaaggttaacgccctcaggtcgaaaaactccacccaactgttatttgtatttatttccaatgccttagagagattgccatttgaatatgttcatgtattgttttagtgataatcctacaatcgtaacccaaaaagaggtcgccctctgcgcgccgtcgtccaatataggcgaagtcacccttgcgactcaggcggattctaccttgtacacgtgtcgagtggaaaagtcccatgtggatcactccgttgccccgtcgctcaccgtgttggggggaaggtgcacatggctcagttctcaatggaaattatctgcctaaccggctcagttctgcgtagaaaccaacatgcaagctccaccgggtgcaaagcggcagcggcggcaggatatattcaattgtaaatggcttcatgtccgggaaatctacatggatcagcaatgagtatgatggtcaatatggagaaaaagaaagagtaattaccaattttttttcaattcaaaaatgtagatgtccgcagcgttattataaaatgaaagtacattttgataaaacgacaaattacgatccgtcgtatttataggcgaaagcaataaacaaattattctaattcggaaatctttatttcgacgtgtctacattcacgtccaaatgggggcttagatgagaaacttcacgatcgatgcggccctgccggcgcgccactagtcaacaattggccaatctttgttctaaattgctaataaacgaccatttccgtcaattctccttggttgcaacagtctacccgtcaaatgtttactaatttataagtgtgaagtttgaattatgaaagacgaaatcgtattaaaaattcacaagaataaacaactccatagattttcaaaaaaacagtcacgagaaaaaaaccacagtccgtttgtctgctcttctagtttttattatttttctattaatagttttttgttatttcgagaataaaatttgaacgatgtccgaaccacaaaagccgagccgataaatcctaagccgagcctaactttagccgtaaccatcagtcacggctcccgggctaattcatttgaaccgaatcataatcaacggtttagatcaaactcaaaacaatctaacggcaacatagacgcgtcggtgagctaaaaagagtgtgaaagccaggtcaccatagcattgtctctcccagattttttatttgggaaataatagaagaaatagaaaaaaataaaagagtgagaaaaatcgtagagctatatattcgcacatgtactcgtttcgctttccttagtgttagctgctgccgctgttgtttctcctccatttctctatctttctctctcgctgcttctcgaatcttctgtatcatcttcttcttcttcaaggtgagtctctagatccgttcgcttgattttgctgctcgttagtcgttattgttgattctctatgccgatttcgctagatctgtttagcatgcgttgtggttttatgagaaaatctttgttttgggggttgcttgttatgtgattcgatccgtgcttgttggatcgatctgagctaattcttaaggtttatgtgttagatctatggagtttgaggattcttctcgcttctgtcgatctctcgctgttatttttgtttttttcagtgaagtgaagttgtttagttcgaaatgacttcgtgtatgctcgattgatctggttttaatcttcgatctgttaggtgttgatgtttacaagtgaattctagtgttttctcgttgagatctgtgaagtttgaacctagttttctcaataatcaacatatgaagcgatgtttgagtttcaataaacgctgctaatcttcgaaactaagttgtgatctgattcgtgtttacttcatgagcttatccaattcatttcggtttcattttactttttttttagtgaaccatggcgcaagttagcagaatctgcaatggtgtgcagaacccatctcttatctccaatctctcgaaatccagtcaacgcaaatctcccttatcggtttctctgaagacgcagcagcatccacgagcttatccgatttcgtcgtcgtggggattgaagaagagtgggatgacgttaattggctctgagcttcgtcctcttaaggtcatgtcttctgtttccacggcgtgcatgggggaagcggtgatcgccgaagtatcgactcaactatcagaggtagttggcgtcatcgagcgccatctcgaaccgacgttgctggccgtacatttgtacggctccgcagtggatggcggcctgaagccacacagtgatattgatttgctggttacggtgaccgtaaggcttgatgaaacaacgcggcgagctttgatcaacgaccttttggaaacttcggcttcccctggagagagcgagattctccgcgctgtagaagtcaccattgttgtgcacgacgacatcattccgtggcgttatccagctaagcgcgaactgcaatttggagaatggcagcgcaatgacattcttgcaggtatcttcgagccagccacgatcgacattgatctggctatcttgctgacaaaagcaagagaacatagcgttgccttggtaggtccagcggcggaggaactctttgatccggttcctgaacaggatctatttgaggcgctaaatgaaaccttaacgctatggaactcgccgcccgactgggctggcgatgagcgaaatgtagtgcttacgttgtcccgcatttggtacagcgcagtaaccggcaaaatcgcgccgaaggatgtcgctgccgactgggcaatggagcgcctgccggcccagtatcagcccgtcatacttgaagctagacaggcttatcttggacaagaagaagatcgcttggcctcgcgcgcagatcagttggaagaatttgtccactacgtgaaaggcgagatcaccaaggtagtcggcaaataaggatcaattcccgatcgttcaaacatttggcaataaagtttcttaagattgaatcctgttgccggtcttgcgatgattatcatataatttctgttgaattacgttaagcatgtaataattaacatgtaatgcatgacgttatttatgagatgggtttttatgattagagtcccgcaattatacatttaatacgcgatagaaaacaaaatatagcgcgcaaactaggataaattatcgcgcgcggtgtcatctatgttactagatcacgcgtgtatgcaatatcctgcagggtattaattaattatgccctaagacatcctggaccaatatgctgaagattatgctacctacaccaggataggacttgaagcacttaaccttgaagattggttcgaagaaccagaacccgatccacctaaccctgtggaccgccagaggatagaggacatcctggacctactgaacgtcagcaatgacgactgaaagattcccaggacaccggcggaagtggtggacccagtctaggtgcgatgcttagtcgcgcacgatgactatgtcggaaggcatctttgctttcggcaaactttagtaatactttaaggaaagtattgtacaagttaggtgcagagacaataatgcacccagctttagctttgtttatggaattattgtgtcggttgcattattggatgcctgcgtgcaccctaagcaatcaacggagaaacaaagataaaaatcaattactcacatgaaagagtattgatcacgagtcactatggagcgacaatctccagacaggatgtcagcatcttatcttcctttgaagaaagcatcatcaataacgatgtaatggtggggacatccactaagttattgctctgcaaacagctcaaaaagctactggccgacaatcataattgctcggcatgtccaggtggggcctccactagcaataatacaagctttacagcttgcagtgactcatcctccaataatggagaaaaagacgtcagcagtgacgaacaagggtcgaaagacttgcctatataagggcattctcccctcagttgaagatcatcgaaagttggagcaataaactctctcttcaacaaatctatcttttatcttttatcgccgcaatggcgggatctaagaagagaagaattaaacaagatcgcaccgagaaggagaacaaggagctggagaacctggagatcaacctccgcaaggaaatcgccaaagcgttcaagggcaatgaagggtacaagagcctcttcaagaaagacatcatcgaaactatcctcccagagtttctcgatgacaaggacgagatcgcgctggtgaactcctttaacgggttcacaaccgcgtttaccggcttctttgataacagggaaaatatgttctccgaggaggccaagtccaccagcatcgccttcaggtgtatcaacgagaacctcacccgctacatttccaatatggacattttcgagaaggtggatgcgatcttcgataagcacgaggtgcaggagatcaaagagaagattctcaattccgattatgacgtcgaggatttcttcgaaggggagttctttaattttgtgctcacacaagagggcattgacgtgtacaacgcgattatcgggggcttcgtcacagagtccggggagaagattaaggggctgaatgagtacatcaatctgtacaatcagaagaccaagcagaaactgccgaaattcaagccgctctacaagcaagtcctgtccgatagggaaagcctctccttctacggcgagggctataccagcgacgaggaggtgctggaagtcttccgcaacacactgaataagaatagcgagattttctcctccatcaagaagctcgagaagctctttaagaactttgacgagtacagctccgccgggattttcgtgaagaacgggccggcgatcagcaccatctccaaggacatctttggcgagtggaacgtcatcagggacaagtggaacgccgagtacgacgacatccacctgaagaagaaggcggtggtgaccgagaagtatgaggacgatcgcaggaagtccttcaaaaaaatcggctccttcagcctcgaacagctccaggagtatgccgatgcggatctgtccgtcgtcgagaagctgaaggaaatcatcattcagaaggtcgacgagatctataaagtgtacgggtccagcgagaagctgttcgacgccgactttgtgctcgagaagtccctcaaaaagaatgacgccgtggtggccattatgaaagacctgctcgactccgtgaagtccttcgaaaattacattaaagcgttctttggggaggggaaggaaactaacagggatgagtccttctatggcgactttgtcctcgcgtacgacatcctgctgaaggtcgaccacatttacgacgcgatccgcaactacgtgacacagaagccgtactccaaagacaagttcaagctgtacttccagaacccgcaatttatgcgcggctgggacaaggataaagagacagactaccgcgcgacaattctccgctatggctccaaatactatctggccatcatggacaagaagtacgcgaagtgcctgcagaagatcgacaaagacgacgtcaatggcaactatgaaaagatcaactacaagctgctgccgggcccgaacaagatgctcccgagggtgttcttcagcaagaagtggatggcctactacaatccaagcgaggatattcagaaaatctataaaaacgggaccttcaagaagggggacatgtttaacctcaacgactgccacaagctcattgatttcttcaaggatagcatttcccgctacccgaaatggtccaatgcgtacgattttaacttctccgagacagaaaagtacaaagacatcgcgggcttttacagggaggtggaggagcaagggtataaagtttcttttgaatccgcgagcaagaaggaagtcgacaagctcgtcgaggagggcaagctctacatgttccaaatttataacaaggacttttccgacaagagccatgggaccccaaacctccacaccatgtacttcaaactgctctttgacgagaacaaccacgggcaaatcaggctgagcggcggcgccgaattattcatgcgcagggcctccctcaagaaggaagagctggtcgtccatccagccaattccccgatcgcgaacaagaacccggacaatccgaaaaagaccaccaccctgtcctacgacgtctacaaggacaaacgcttcagcgaagaccagtacgaattacacatcccaattgcgattaataagtgcccaaagaatatcttcaaaattaatacagaggtcagggtgctgctcaaacacgacgacaatccgtatgtcatcggcattgacaggggcgagcgcaatctgctctatatcgtggtcgtggatgggaagggcaatattgtggagcagtactccctgaacgagattatcaacaacttcaatgggattaggattaagaccgactatcacagcctgctcgacaagaaagaaaaagagaggtttgaggcccgccaaaactggacctccattgagaatatcaaagaattaaaggccggctatatttcccaagtcgtccacaagatctgcgagctggtggagaaatatgacgccgtgattgcgctcgaagacttaaattctgggttcaagaactcccgcgtgaaggtggaaaaacaggtgtatcagaaattcgagaaaatgctgatcgacaaactcaattatatggtggataagaagtccaacccgtgtgccacagggggcgcgctgaagggctatcagatcaccaacaagttcgagagcttcaagagcatgagcacccagaacgggtttattttctacatcccggcgtggctcacctccaagattgacccgagcaccggcttcgtgaacctcctgaagacaaagtatacctccattgccgacagcaagaagtttatctcctccttcgaccgcattatgtatgtgccggaggaggacctcttcgagttcgccctcgactacaaaaacttcagccgcacagatgcggattacatcaagaagtggaagctgtactcctacgggaacaggatccgcatcttcaggaatccaaaaaaaaataacgtctttgactgggaggaagtgtgcctgacatccgcctacaaggaactgttcaataaatacggcatcaattaccagcagggcgacattcgcgccctcctctgtgagcagtccgacaaagcgttttactccagcttcatggccctcatgtccctgatgctccaaatgaggaatagcatcacagggcgcaccgacgtcgacttcctcatcagcccggtgaagaactccgacgggatcttttacgactcccgcaactatgaggcgcaagagaatgcgatcctcccgaagaacgccgatgcgaacggggcctataatatcgccaggaaagtgctctgggccatcgggcagttcaaaaaggcggaggatgagaagctcgacaaggtgaaaattgccatttccaacaaggagtggctggagtacgcgcagacctccgtgaagcacggctcctctggcagctccggctctagcggctcctctggcagctccggctccaagctggagaagtttacaaactgttacagcctctccaaaaccctcaggtttaaagcgatcccggtgggcaagacccaggagaacatcgacaacaagaggctcctggtggaagacgagaagcgcgccgaagactacaagggcgtgaagaagctgctcgataggtactacctcagctttattaacgacgtgctgcacagcatcaaactcaagaatctcaacaactacatctccctcttccgcaaaaagaccggatctaagaagagaagaattaaacaagattgatagaagggctctctgtcatgatttcatactttcattattgagctctgtaattacaattatgaccatgagaacatctcttattgtgtggccttttaattgctgatgttagtactgaaccaaagcttatcgtgatgatgtaaaagcaataagtacttgtttgtagcttctttgtgtctccctttgggcttaatacatctgtttagtgttgtggctttggcatagacttctcttggtaataatgccttgcaatgcaaaatttcaattatcaaattctattatgttctcaccttatggtaacagcttaccctgtggaagatgagattcttgagttgagtcattgccaatttttggcattagcttttgaattagtgaattttgacaaaaattaccgtgacactgattttgttgaagctcttaagtgtagtttttacaaaatttcagtggctcgttgtgattatgtcaaactcacggcgaatgtagttcttacagaatttcagtggctcaaggatttaacgcgtgtatgcggccgcaaactatatcctgcagggtattaattaattatgccaatctgtgaagagtttattcacgattaatctaggaggaagcgcgctttgttggctgtaggcccaaagcagcaatcaacagagtgtgtgagggccagctgctggaaggttcggttttttcaacaggcccacacgcgcgggctgggctgggctgggctggccacgttccttcggtagcagttcggtggagcaacgaggacggtggaatcgaagtttagtaccacctcggctgaagatacggagaaagaccagtttataacctgcctctggagcctgctgctcggtctcttaatttctactaagtgtagatttgtaaccaacatcccctgatgataatttctactaagtgtagattgccatgcactccaagtcccctataatttctactaagtgtagatggaggataagtttgagaactttataatttctactaagtgtagattatgaggacccactgggtttccataatttctactaagtgtagatggtttccaggtcgcggccgttggtaatttctactaagtgtagatttttttttggatttaacgcgtgtatgcggccgcaacagagaaactagacctgcaggaaggcgccggcgctctcttaaggtagc

SEQ ID NO: 795 - DNA, 15531 bp, synthetic construct
  source 1..15531: mol_type = other DNA
aaggatccctgaaagcgacgttggatgttaacatctacaaattgccttttcttatcgaccatgtacgtaagcgcttacgtttttggtggacccttgaggaaactggtagctgttgtgggcctgtggactcaagatggatcattaatttccaccttcacctacgatggggggcatcgcaccggtgagtaatattgtacggctaagagcgaatttggcctgtagacctcaattgcgagctttctaatttcaaactattcgggcctaacttttggtgtgatgatgctgactggcaggatatataccgttgtaatttgagctcgtgtgaataagtcgctgtgtatgtttgtttgattgtttctgttggagtgcagcccatttcaccggacaagtcggctagattgatttagccctgatgaactgccgaggggaagccatcttgagcgcggaatgggaatggatttcgttgtacaacgacacgacagaacacccacgggaccgagcttcgaagctttaacgcttgagttaagccgcgccgcgaagcggcgtcggcttgaacgaattgttagacatcagaagaactcgtcaagaaggcgatagaaggcgatgcgctgcgaatcgggagcggcgataccgtaaagcacgaggaagcggtcagcccattcgccgccaagctcttcagcaatatcacgggtagccaacgctatgtcctgatagcggtccgccacacccagccggccacagtcgatgaatccagaaaagcggccattttccaccatgatattcggcaagcaggcatcgccatgggtcacgacgagatcctcgccgtcgggcatgcgcgccttgagcctggcgaacagttcggctggcgcgagcccctgatgctcttcgtccagatcatcctgatcgacaagaccggcttccatccgagtacgtgctcgctcgatgcgatgtttcgcttggtggtcgaatgggcaggtagccggatcaagcgtatgcagccgccgcattgcatcagccatgatggatactttctcggcaggagcaaggtgagatgacaggagatcctgccccggcacttcgcccaatagcagccagtcccttcccgcttcagtgacaacgtcgagcacagctgcgcaaggaacgcccgtcgtggccagccacgatagccgcgctgcctcgtcctgcagttcattcagggcaccggacaggtcggtcttgacaaaaagaaccgggcgcccctgcgctgacagccggaacacggcggcatcagagcagccgattgtctgttgtgcccagtcatagccgaatagcctctccacccaagcggccggagaacctgcgtgcaatccatcttgttcaatcatggctttgtttctccttcaatcattgactattgtcacgttattctgaatcgacgagaactcacatcaatctcaacaagcatctctgctcgcgaaattggtgttgtctcattaaaacgtgaccgtcaaagtctattcactaggacccaaatctctccaggtcccgcaagctagcttcgccgcccacgtttctctttcttctcatattcaattgtcaaaaaacagacctcatgaccaaaatcccttaacgtgagttttcgttccactgagcgtcagaccccgtagaaaagatcaaaggatcttcttgagatcctttttttctgcgcgtaatctgctgcttgcaaacaaaaaaaccaccgctaccagcggtggtttgtttgccggatcaagagctaccaactttttttccgaaggtaactggcttcagcagagcgcagataccaaatactgtccttctagtgtagccgtagttaggccaccacttcaagaactctgtagcaccgcctacatacctcgctctgctaatcctgttaccagtggctgctgccagtggcgataagtcgtgtcttaccgggttggactcaagacgatagttaccggataaggcgcagcggtcgggctgaacggggggttcgtgcacacagcccagcttggagcgaacgacctacaccgaactgagatacctacagcgtgagctatgagaaagcgccacgcttcccgaagggagaaaggcggacaggtatccggtaagcggcagggtcggaacaggagagcgcacgagggagcttccagggggaaacgcctggtatctttatagtcctgtcgggtttcgccacctctgacttgagcgtcgatttttgtgatgctcgtcaggggggcggagcctatggaaaaacgccagcaacgcggcctttttacggttcctggccttttgctggccttttgctcacatgttctttcctgcgttatcccctgattctgtggataaccgtattaccgcctttgagtgagctgataccgctcgccgcagccgaacgaccgagcgcagcgagtcagtgagcgaggaagcggaagagcgcctgatgcggtattttctccttacgcatctgtgcggtatttcacaccgcatatggtgcactctcagtacaatctgctctgatgccgcatagttaagccagtatacaggctctccttcacgatcaacgatcggcatggggccttcgtgcttgttgagtaatgttatcgctcccatcagagcacgcttggtactccgggaatcggatggtctgtcgatcatccaaaaaacgctcatgttttcaacctattaggtctgtggtcagctgaccacagaccatcctgctccatactcgctaattctagccaaaccgcaacgtcccctgcccgctagccttcaagagcgccattatcatcgggccaagtgaaaacttcccgagctcgctccgccgtgtcagatctcggagatagcccccgggcgaattgatgaagttcgctcgctccaaaatgcacgccatcgctgctgccgcattctccggtcccattgcctcacacgcgtcttggtaagccgacgggctgacccccagcatagaccgaaccaccaccgcagccgacatgaggtcacgccagctagcaaccgcaccgctcggcccataattgccaatggtcgggcatgctttcaggatcatcccgagggggaacgcttttatcggctcgctccttgcccggtctatttcactcggcttagcgccctgctccttttcagagcgaggttcaagttcattaacggattcgggttttgaattctgtatgtgctgctcgctctgggcagcattggtgctattattttctgaattgtctctaatttccaaccggttgattatctcttcctggagcatccacatctcttcgagaattgactctacatcagcaagcgtcggggcgcgtggaattctacccacaagttccacatagacttcctcgacagcttgccagtcgccctccgctccctcttccatagctgccgtaattagcttccgaacgtcccgtcggcaaatcgtcagactttctttggccatcctgaatgctgctcgatcggccatcacttgctgtgccatcatcgctagctcttcggaccgcgcgagaagcggagacaaatcgaagccaaacgcgcgctcgatctgaccagcgccatccttacgagcgtaacgctttccgttggcgctatccttccggacgatcaagcctgactccacgagcatggcgatgtgcctacgcaaagtcgcgccagccatcccatgcgcccgaagggcaagctgagcattcgacgggaagacgatcagctgtgcctcctgacgcaactccgtttccgggtgaaagctcaatagcgcatcaaggacggcaagactgttggactggattccaagtagttccatggccgcggacgcatctctaaagaccttccacttgtccgctgtcttgccttgtttgatatcggccagcgccgtctggcgccgcacaagcgcaagcgtcattggccgccgcccgaatggcgtcgttacacttcctgtctgcatcatctttcacctttcagcaggcaaaggaaatcagctcaccaaaacggcgctaaaaactcttgacgaggattcgaggaaatgcgattctgttcgcgctagagagacagaagggcttccgcgacggcgacgttgagggggctcttttcttttgcggtttactctccccgtttccgttggttctcagcgtggtacgcttgatacagcgctggcacatgatcgagcacgaaggtcgcaaaatcgggcgtcgccttcctgtcaatcgtgatttccagtttggccttgctctgcgtcacctgtgcaattctggtgccgtctggggtggccatgacctcgggaagtccacgcgcaacccgactgggcttcagactagcgatcaccgccttgaatcgttctgccgatggcagcgcttgaacttcctccgacatagcatatttagccacgtcggccggtgaagaaactttctcaatcagctcggcaagttgttgccaactcggccgtccaacaccaggagcggcaccaatagcatcggtcagttcagaggggagggcgtcgacgagcagaagcatcttggacaaattgctcttgtcgatcgacatcgcggcgatgacaatctctcgagaaaactgcctgttcaggcgatgtgcgaagcgcgccttttcgatgaaggtaagatcttcgcgctcattgttttcctgaccctgtgctacgaccacttgctcgtccgtcagttcgcgaacgaccgctctgaccggaagtccgagttctgaaacggcgcgtagccggcggtggccgaaggcaacctgatatcggcccggctggctcggatgcggtcgcacaaggattgggacttgctgtccttgttcccggatcgaagtaaggagcccgtcaatgtcccctcgcatacgatcctgcacgaaagacggttctattgacgaggcatccaactctatcactgcctgaccttcagcgaggcgccgctcgatctcttcggcacggctaagacgatcgttttgctctcgcagtgcgttaccaatgttcgctgtgagcttcgttgccggatcgcgctccttccttgttacgccgaggagcggcatggagcggttctttgccgtcctattgtcggcgggcgacgtttcaggggcgtcagttgacacgccaaggatgtgcttccggctcatgtgggcctaccccatgcttttttgatcagtgtttcgatctcgtcgttgacggcgttcatcgcctccaaggctcgatcataggtcgagcgcgtgaacaggccacgctccacttcgaatagagtctggtttgtcaggccagcgtccgaaaccgcggtggttttaagcatcggaaaattgaggacattttcgccaaaaatcgaccgcagataacctaccatttggttctgtggtccgtcgctcggttcgaaacgggttatcagatagcgcatccaattaaacttgaacttggcgccagcattctcgatttcacgcaaaaggttcgatgtcattgccagaaactggttcatcgacatcacatccagcatctgcggatggaccgtgacaagaatggacgtcgccgcagtcaatgcggatagcgtgagatacccaagctggggagggcagtcgatgaccacgacgtcatagttatccgcgatatcttcaattacttggctgatgcgaccataaaagagcgtgtcgccctctttgcggttcatcagcgcgcgtggcgtatcgtgttcaaactccatcagctcaaggttaccaggaatcaggtggaggtcgggaatgtaagtccctcggacgactcgttcgattgccacttgctcatcatcataccttatagcgccgtagagcgtttcgttcgggccaacgtccgtttccggttggctcccaaagagtgcagaaaggctcgcttgaggatcgagatcaatggccaagactcgatatccgcgcatagcgaggtactgcgccagatgcgcggcggtggtggtcttacccgacccacctttgaaattcatcacagagataacctgaagctgctcgccgcctcgacgatgtggcaggtagcgccggttcccgcggccgacctgatccatatacttccgaatcacatggatatcttcaattgagaacattcgcctgccacccgggctcatgctaacattcaactctggcatctcagacgcggtctgccgtaaatatgactcgccaacgccgagcagcttggacgcctccgatggcccgaatgttcgaatgcccttctcggaatgcggcgggaaaaccttaagatgatgtgcttgaagttggctcgagagggcatcggcatgacgctccatcaaggccgtcaaccctacaactacaggcgctgcttttaggacagacttcgccatctcaaacccattccttgccagtggcgatatttttcgcgaaactggaaaagttccgccgctggcaattagcgccgattctgctgtttgggcaagagcttttaggttaacagaaggttaacgccctcaggtcgaaaaactccacccaactgttatttgtatttatttccaatgccttagagagattgccatttgaatatgttcatgtattgttttagtgataatcctacaatcgtaacccaaaaagaggtcgccctctgcgcgccgtcgtccaatataggcgaagtcacccttgcgactcaggcggattctaccttgtacacgtgtcgagtggaaaagtcccatgtggatcactccgttgccccgtcgctcaccgtgttggggggaaggtgcacatggctcagttctcaatggaaattatctgcctaaccggctcagttctgcgtagaaaccaacatgcaagctccaccgggtgcaaagcggcagcggcggcaggatatattcaattgtaaatggcttcatgtccgggaaatctacatggatcagcaatgagtatgatggtcaatatggagaaaaagaaagagtaattaccaattttttttcaattcaaaaatgtagatgtccgcagcgttattataaaatgaaagtacattttgataaaacgacaaattacgatccgtcgtatttataggcgaaagcaataaacaaattattctaattcggaaatctttatttcgacgtgtctacattcacgtccaaatgggggcttagatgagaaacttcacgatcgatgcggccctgccggcgcgccactagtcaacaattggccaatctttgttctaaattgctaataaacgaccatttccgtcaattctccttggttgcaacagtctacccgtcaaatgtttactaatttataagtgtgaagtttgaattatgaaagacgaaatcgtattaaaaattcacaagaataaacaactccatagattttcaaaaaaacagtcacgagaaaaaaaccacagtccgtttgtctgctcttctagtttttattatttttctattaatagttttttgttatttcgagaataaaatttgaacgatgtccgaaccacaaaagccgagccgataaatcctaagccgagcctaactttagccgtaaccatcagtcacggctcccgggctaattcatttgaaccgaatcataatcaacggtttagatcaaactcaaaacaatctaacggcaacatagacgcgtcggtgagctaaaaagagtgtgaaagccaggtcaccatagcattgtctctcccagattttttatttgggaaataatagaagaaatagaaaaaaataaaagagtgagaaaaatcgtagagctatatattcgcacatgtactcgtttcgctttccttagtgttagctgctgccgctgttgtttctcctccatttctctatctttctctctcgctgcttctcgaatcttctgtatcatcttcttcttcttcaaggtgagtctctagatccgttcgcttgattttgctgctcgttagtcgttattgttgattctctatgccgatttcgctagatctgtttagcatgcgttgtggttttatgagaaaatctttgttttgggggttgcttgttatgtgattcgatccgtgcttgttggatcgatctgagctaattcttaaggtttatgtgttagatctatggagtttgaggattcttctcgcttctgtcgatctctcgctgttatttttgtttttttcagtgaagtgaagttgtttagttcgaaatgacttcgtgtatgctcgattgatctggttttaatcttcgatctgttaggtgttgatgtttacaagtgaattctagtgttttctcgttgagatctgtgaagtttgaacctagttttctcaataatcaacatatgaagcgatgtttgagtttcaataaacgctgctaatcttcgaaactaagttgtgatctgattcgtgtttacttcatgagcttatccaattcatttcggtttcattttactttttttttagtgaaccatggcgcaagttagcagaatctgcaatggtgtgcagaacccatctcttatctccaatctctcgaaatccagtcaacgcaaatctcccttatcggtttctctgaagacgcagcagcatccacgagcttatccgatttcgtcgtcgtggggattgaagaagagtgggatgacgttaattggctctgagcttcgtcctcttaaggtcatgtcttctgtttccacggcgtgcatgggggaagcggtgatcgccgaagtatcgactcaactatcagaggtagttggcgtcatcgagcgccatctcgaaccgacgttgctggccgtacatttgtacggctccgcagtggatggcggcctgaagccacacagtgatattgatttgctggttacggtgaccgtaaggcttgatgaaacaacgcggcgagctttgatcaacgaccttttggaaacttcggcttcccctggagagagcgagattctccgcgctgtagaagtcaccattgttgtgcacgacgacatcattccgtggcgttatccagctaagcgcgaactgcaatttggagaatggcagcgcaatgacattcttgcaggtatcttcgagccagccacgatcgacattgatctggctatcttgctgacaaaagcaagagaacatagcgttgccttggtaggtccagcggcggaggaactctttgatccggttcctgaacaggatctatttgaggcgctaaatgaaaccttaacgctatggaactcgccgcccgactgggctggcgatgagcgaaatgtagtgcttacgttgtcccgcatttggtacagcgcagtaaccggcaaaatcgcgccgaaggatgtcgctgccgactgggcaatggagcgcctgccggcccagtatcagcccgtcatacttgaagctagacaggcttatcttggacaagaagaagatcgcttggcctcgcgcgcagatcagttggaagaatttgtccactacgtgaaaggcgagatcaccaaggtagtcggcaaataaggatcaattcccgatcgttcaaacatttggcaataaagtttcttaagattgaatcctgttgccggtcttgcgatgattatcatataatttctgttgaattacgttaagcatgtaataattaacatgtaatgcatgacgttatttatgagatgggtttttatgattagagtcccgcaattatacatttaatacgcgatagaaaacaaaatatagcgcgcaaactaggataaattatcgcgcgcggtgtcatctatgttactagatcacgcgtgtatgcaatatcctgcagggtattaattaattatgccctaagacatcctggaccaatatgctgaagattatgctacctacaccaggataggacttgaagcacttaaccttgaagattggttcgaagaaccagaacccgatccacctaaccctgtggaccgccagaggatagaggacatcctggacctactgaacgtcagcaatgacgactgaaagattcccaggacaccggcggaagtggtggacccagtctaggtgcgatgcttagtcgcgcacgatgactatgtcggaaggcatctttgctttcggcaaactttagtaatactttaaggaaagtattgtacaagttaggtgcagagacaataatgcacccagctttagctttgtttatggaattattgtgtcggttgcattattggatgcctgcgtgcaccctaagcaatcaacggagaaacaaagataaaaatcaattactcacatgaaagagtattgatcacgagtcactatggagcgacaatctccagacaggatgtcagcatcttatcttcctttgaagaaagcatcatcaataacgatgtaatggtggggacatccactaagttattgctctgcaaacagctcaaaaagctactggccgacaatcataattgctcggcatgtccaggtggggcctccactagcaataatacaagctttacagcttgcagtgactcatcctccaataatggagaaaaagacgtcagcagtgacgaacaagggtcgaaagacttgcctatataagggcattctcccctcagttgaagatcatcgaaagttggagcaataaactctctcttcaacaaatctatcttttatcttttatcgccgcaatggcgggatctaagaagagaagaattaaacaagattccgacgggatcttttacgactcccgcaactatgaggcgcaagagaatgcgatcctcccgaagaacgccgatgcgaacggggcctataatatcgccaggaaagtgctctgggccatcgggcagttcaaaaaggcggaggatgagaagctcgacaaggtgaaaattgccatttccaacaaggagtggctggagtacgcgcagacctccgtgaagcacggctcctctggcagctccggctctagcggctcctctggcagctccggctccaagctggagaagtttacaaactgttacagcctctccaaaaccctcaggtttaaagcgatcccggtgggcaagacccaggagaacatcgacaacaagaggctcctggtggaagacgagaagcgcgccgaagactacaagggcgtgaagaagctgctcgataggtactacctcagctttattaacgacgtgctgcacagcatcaaactcaagaatctcaacaactacatctccctcttccgcaaaaagacccgcaccgagaaggagaacaaggagctggagaacctggagatcaacctccgcaaggaaatcgccaaagcgttcaagggcaatgaagggtacaagagcctcttcaagaaagacatcatcgaaactatcctcccagagtttctcgatgacaaggacgagatcgcgctggtgaactcctttaacgggttcacaaccgcgtttaccggcttctttgataacagggaaaatatgttctccgaggaggccaagtccaccagcatcgccttcaggtgtatcaacgagaacctcacccgctacatttccaatatggacattttcgagaaggtggatgcgatcttcgataagcacgaggtgcaggagatcaaagagaagattctcaattccgattatgacgtcgaggatttcttcgaaggggagttctttaattttgtgctcacacaagagggcattgacgtgtacaacgcgattatcgggggcttcgtcacagagtccggggagaagattaaggggctgaatgagtacatcaatctgtacaatcagaagaccaagcagaaactgccgaaattcaagccgctctacaagcaagtcctgtccgatagggaaagcctctccttctacggcgagggctataccagcgacgaggaggtgctggaagtcttccgcaacacactgaataagaatagcgagattttctcctccatcaagaagctcgagaagctctttaagaactttgacgagtacagctccgccgggattttcgtgaagaacgggccggcgatcagcaccatctccaaggacatctttggcgagtggaacgtcatcagggacaagtggaacgccgagtacgacgacatccacctgaagaagaaggcggtggtgaccgagaagtatgaggacgatcgcaggaagtccttcaaaaaaatcggctccttcagcctcgaacagctccaggagtatgccgatgcggatctgtccgtcgtcgagaagctgaaggaaatcatcattcagaaggtcgacgagatctataaagtgtacgggtccagcgagaagctgttcgacgccgactttgtgctcgagaagtccctcaaaaagaatgacgccgtggtggccattatgaaagacctgctcgactccgtgaagtccttcgaaaattacattaaagcgttctttggggaggggaaggaaactaacagggatgagtccttctatggcgactttgtcctcgcgtacgacatcctgctgaaggtcgaccacatttacgacgcgatccgcaactacgtgacacagaagccgtactccaaagacaagttcaagctgtacttccagaacccgcaatttatgcgcggctgggacaaggataaagagacagactaccgcgcgacaattctccgctatggctccaaatactatctggccatcatggacaagaagtacgcgaagtgcctgcagaagatcgacaaagacgacgtcaatggcaactatgaaaagatcaactacaagctgctgccgggcccgaacaagatgctcccgagggtgttcttcagcaagaagtggatggcctactacaatccaagcgaggatattcagaaaatctataaaaacgggaccttcaagaagggggacatgtttaacctcaacgactgccacaagctcattgatttcttcaaggatagcatttcccgctacccgaaatggtccaatgcgtacgattttaacttctccgagacagaaaagtacaaagacatcgcgggcttttacagggaggtggaggagcaagggtataaagtttcttttgaatccgcgagcaagaaggaagtcgacaagctcgtcgaggagggcaagctctacatgttccaaatttataacaaggacttttccgacaagagccatgggaccccaaacctccacaccatgtacttcaaactgctctttgacgagaacaaccacgggcaaatcaggctgagcggcggcgccgaattattcatgcgcagggcctccctcaagaaggaagagctggtcgtccatccagccaattccccgatcgcgaacaagaacccggacaatccgaaaaagaccaccaccctgtcctacgacgtctacaaggacaaacgcttcagcgaagaccagtacgaattacacatcccaattgcgattaataagtgcccaaagaatatcttcaaaattaatacagaggtcagggtgctgctcaaacacgacgacaatccgtatgtcatcggcattgacaggggcgagcgcaatctgctctatatcgtggtcgtggatgggaagggcaatattgtggagcagtactccctgaacgagattatcaacaacttcaatgggattaggattaagaccgactatcacagcctgctcgacaagaaagaaaaagagaggtttgaggcccgccaaaactggacctccattgagaatatcaaagaattaaaggccggctatatttcccaagtcgtccacaagatctgcgagctggtggagaaatatgacgccgtgattgcgctcgaagacttaaattctgggttcaagaactcccgcgtgaaggtggaaaaacaggtgtatcagaaattcgagaaaatgctgatcgacaaactcaattatatggtggataagaagtccaacccgtgtgccacagggggcgcgctgaagggctatcagatcaccaacaagttcgagagcttcaagagcatgagcacccagaacgggtttattttctacatcccggcgtggctcacctccaagattgacccgagcaccggcttcgtgaacctcctgaagacaaagtatacctccattgccgacagcaagaagtttatctcctccttcgaccgcattatgtatgtgccggaggaggacctcttcgagttcgccctcgactacaaaaacttcagccgcacagatgcggattacatcaagaagtggaagctgtactcctacgggaacaggatccgcatcttcaggaatccaaaaaaaaataacgtctttgactgggaggaagtgtgcctgacatccgcctacaaggaactgttcaataaatacggcatcaattaccagcagggcgacattcgcgccctcctctgtgagcagtccgacaaagcgttttactccagcttcatggccctcatgtccctgatgctccaaatgaggaatagcatcacagggcgcaccgacgtcgacttcctcatcagcccggtgaagaacggatctaagaagagaagaattaaacaagattgatagaagggctctctgtcatgatttcatactttcattattgagctctgtaattacaattatgaccatgagaacatctcttattgtgtggccttttaattgctgatgttagtactgaaccaaagcttatcgtgatgatgtaaaagcaataagtacttgtttgtagcttctttgtgtctccctttgggcttaatacatctgtttagtgttgtggctttggcatagacttctcttggtaataatgccttgcaatgcaaaatttcaattatcaaattctattatgttctcaccttatggtaacagcttaccctgtggaagatgagattcttgagttgagtcattgccaatttttggcattagcttttgaattagtgaattttgacaaaaattaccgtgacactgattttgttgaagctcttaagtgtagtttttacaaaatttcagtggctcgttgtgattatgtcaaactcacggcgaatgtagttcttacagaatttcagtggctcaaggatttaacgcgtgtatgcggccgcaaactatatcctgcagggtattaattaattatgccaatctgtgaagagtttattcacgattaatctaggaggaagcgcgctttgttggctgtaggcccaaagcagcaatcaacagagtgtgtgagggccagctgctggaaggttcggttttttcaacaggcccacacgcgcgggctgggctgggctgggctggccacgttccttcggtagcagttcggtggagcaacgaggacggtggaatcgaagtttagtaccacctcggctgaagatacggagaaagaccagtttataacctgcctctggagcctgctgctcggtttcaaagattaaataatttctactaagtgtagatggcagtgtactcagcaaaggttttaatttctactaagtgtagatgtaggatccttcttctcaacgtttaatttctactaagtgtagatttgctaccgacccagtgagtggttaatttctactaagtgtagatgttcaaggtttggtggaccactctaatttctactaagtgtagatgttcagaccttcaaatggaaacctaatttctactaagtgtagatttttttttggatttaacgcgtgtatgcggccgcaacagagaaactagacctgcaggaaggcgccggcgctctcttaaggtagc

SEQ ID NO: 796 - DNA, 15531 bp, synthetic construct
  source 1..15531: mol_type = other DNA
aaggatccctgaaagcgacgttggatgttaacatctacaaattgccttttcttatcgaccatgtacgtaagcgcttacgtttttggtggacccttgaggaaactggtagctgttgtgggcctgtggactcaagatggatcattaatttccaccttcacctacgatggggggcatcgcaccggtgagtaatattgtacggctaagagcgaatttggcctgtagacctcaattgcgagctttctaatttcaaactattcgggcctaacttttggtgtgatgatgctgactggcaggatatataccgttgtaatttgagctcgtgtgaataagtcgctgtgtatgtttgtttgattgtttctgttggagtgcagcccatttcaccggacaagtcggctagattgatttagccctgatgaactgccgaggggaagccatcttgagcgcggaatgggaatggatttcgttgtacaacgacacgacagaacacccacgggaccgagcttcgaagctttaacgcttgagttaagccgcgccgcgaagcggcgtcggcttgaacgaattgttagacatcagaagaactcgtcaagaaggcgatagaaggcgatgcgctgcgaatcgggagcggcgataccgtaaagcacgaggaagcggtcagcccattcgccgccaagctcttcagcaatatcacgggtagccaacgctatgtcctgatagcggtccgccacacccagccggccacagtcgatgaatccagaaaagcggccattttccaccatgatattcggcaagcaggcatcgccatgggtcacgacgagatcctcgccgtcgggcatgcgcgccttgagcctggcgaacagttcggctggcgcgagcccctgatgctcttcgtccagatcatcctgatcgacaagaccggcttccatccgagtacgtgctcgctcgatgcgatgtttcgcttggtggtcgaatgggcaggtagccggatcaagcgtatgcagccgccgcattgcatcagccatgatggatactttctcggcaggagcaaggtgagatgacaggagatcctgccccggcacttcgcccaatagcagccagtcccttcccgcttcagtgacaacgtcgagcacagctgcgcaaggaacgcccgtcgtggccagccacgatagccgcgctgcctcgtcctgcagttcattcagggcaccggacaggtcggtcttgacaaaaagaaccgggcgcccctgcgctgacagccggaacacggcggcatcagagcagccgattgtctgttgtgcccagtcatagccgaatagcctctccacccaagcggccggagaacctgcgtgcaatccatcttgttcaatcatggctttgtttctccttcaatcattgactattgtcacgttattctgaatcgacgagaactcacatcaatctcaacaagcatctctgctcgcgaaattggtgttgtctcattaaaacgtgaccgtcaaagtctattcactaggacccaaatctctccaggtcccgcaagctagcttcgccgcccacgtttctctttcttctcatattcaattgtcaaaaaacagacctcatgaccaaaatcccttaacgtgagttttcgttccactgagcgtcagaccccgtagaaaagatcaaaggatcttcttgagatcctttttttctgcgcgtaatctgctgcttgcaaacaaaaaaaccaccgctaccagcggtggtttgtttgccggatcaagagctaccaactttttttccgaaggtaactggcttcagcagagcgcagataccaaatactgtccttctagtgtagccgtagttaggccaccacttcaagaactctgtagcaccgcctacatacctcgctctgctaatcctgttaccagtggctgctgccagtggcgataagtcgtgtcttaccgggttggactcaagacgatagttaccggataaggcgcagcggtcgggctgaacggggggttcgtgcacacagcccagcttggagcgaacgacctacaccgaactgagatacctacagcgtgagctatgagaaagcgccacgcttcccgaagggagaaaggcggacaggtatccggtaagcggcagggtcggaacaggagagcgcacgagggagcttccagggggaaacgcctggtatctttatagtcctgtcgggtttcgccacctctgacttgagcgtcgatttttgtgatgctcgtcaggggggcggagcctatggaaaaacgccagcaacgcggcctttttacggttcctggccttttgctggccttttgctcacatgttctttcctgcgttatcccctgattctgtggataaccgtattaccgcctttgagtgagctgataccgctcgccgcagccgaacgaccgagcgcagcgagtcagtgagcgaggaagcggaagagcgcctgatgcggtattttctccttacgcatctgtgcggtatttcacaccgcatatggtgcactctcagtacaatctgctctgatgccgcatagttaagccagtatacaggctctccttcacgatcaacgatcggcatggggccttcgtgcttgttgagtaatgttatcgctcccatcagagcacgcttggtactccgggaatcggatggtctgtcgatcatccaaaaaacgctcatgttttcaacctattaggtctgtggtcagctgaccacagaccatcctgctccatactcgctaattctagccaaaccgcaacgtcccctgcccgctagccttcaagagcgccattatcatcgggccaagtgaaaacttcccgagctcgctccgccgtgtcagatctcggagatagcccccgggcgaattgatgaagttcgctcgctccaaaatgcacgccatcgctgctgccgcattctccggtcccattgcctcacacgcgtcttggtaagccgacgggctgacccccagcatagaccgaaccaccaccgcagccgacatgaggtcacgccagctagcaaccgcaccgctcggcccataattgccaatggtcgggcatgctttcaggatcatcccgagggggaacgcttttatcggctcgctccttgcccggtctatttcactcggcttagcgccctgctccttttcagagcgaggttcaagttcattaacggattcgggttttgaattctgtatgtgctgctcgctctgggcagcattggtgctattattttctgaattgtctctaatttccaaccggttgattatctcttcctggagcatccacatctcttcgagaattgactctacatcagcaagcgtcggggcgcgtggaattctacccacaagttccacatagacttcctcgacagcttgccagtcgccctccgctccctcttccatagctgccgtaattagcttccgaacgtcccgtcggcaaatcgtcagactttctttggccatcctgaatgctgctcgatcggccatcacttgctgtgccatcatcgctagctcttcggaccgcgcgagaagcggagacaaatcgaagccaaacgcgcgctcgatctgaccagcgccatccttacgagcgtaacgctttccgttggcgctatccttccggacgatcaagcctgactccacgagcatggcgatgtgcctacgcaaagtcgcgccagccatcccatgcgcccgaagggcaagctgagcattcgacgggaagacgatcagctgtgcctcctgacgcaactccgtttccgggtgaaagctcaatagcgcatcaaggacggcaagactgttggactggattccaagtagttccatggccgcggacgcatctctaaagaccttccacttgtccgctgtcttgccttgtttgatatcggccagcgccgtctggcgccgcacaagcgcaagcgtcattggccgccgcccgaatggcgtcgttacacttcctgtctgcatcatctttcacctttcagcaggcaaaggaaatcagctcaccaaaacggcgctaaaaactcttgacgaggattcgaggaaatgcgattctgttcgcgctagagagacagaagggcttccgcgacggcgacgttgagggggctcttttcttttgcggtttactctccccgtttccgttggttctcagcgtggtacgcttgatacagcgctggcacatgatcgagcacgaaggtcgcaaaatcgggcgtcgccttcctgtcaatcgtgatttccagtttggccttgctctgcgtcacctgtgcaattctggtgccgtctggggtggccatgacctcgggaagtccacgcgcaacccgactgggcttcagactagcgatcaccgccttgaatcgttctgccgatggcagcgcttgaacttcctccgacatagcatatttagccacgtcggccggtgaagaaactttctcaatcagctcggcaagttgttgccaactcggccgtccaacaccaggagcggcaccaatagcatcggtcagttcagaggggagggcgtcgacgagcagaagcatcttggacaaattgctcttgtcgatcgacatcgcggcgatgacaatctctcgagaaaactgcctgttcaggcgatgtgcgaagcgcgccttttcgatgaaggtaagatcttcgcgctcattgttttcctgaccctgtgctacgaccacttgctcgtccgtcagttcgcgaacgaccgctctgaccggaagtccgagttctgaaacggcgcgtagccggcggtggccgaaggcaacctgatatcggcccggctggctcggatgcggtcgcacaaggattgggacttgctgtccttgttcccggatcgaagtaaggagcccgtcaatgtcccctcgcatacgatcctgcacgaaagacggttctattgacgaggcatccaactctatcactgcctgaccttcagcgaggcgccgctcgatctcttcggcacggctaagacgatcgttttgctctcgcagtgcgttaccaatgttcgctgtgagcttcgttgccggatcgcgctccttccttgttacgccgaggagcggcatggagcggttctttgccgtcctattgtcggcgggcgacgtttcaggggcgtcagttgacacgccaaggatgtgcttccggctcatgtgggcctaccccatgcttttttgatcagtgtttcgatctcgtcgttgacggcgttcatcgcctccaaggctcgatcataggtcgagcgcgtgaacaggccacgctccacttcgaatagagtctggtttgtcaggccagcgtccgaaaccgcggtggttttaagcatcggaaaattgaggacattttcgccaaaaatcgaccgcagataacctaccatttggttctgtggtccgtcgctcggttcgaaacgggttatcagatagcgcatccaattaaacttgaacttggcgccagcattctcgatttcacgcaaaaggttcgatgtcattgccagaaactggttcatcgacatcacatccagcatctgcggatggaccgtgacaagaatggacgtcgccgcagtcaatgcggatagcgtgagatacccaagctggggagggcagtcgatgaccacgacgtcatagttatccgcgatatcttcaattacttggctgatgcgaccataaaagagcgtgtcgccctctttgcggttcatcagcgcgcgtggcgtatcgtgttcaaactccatcagctcaaggttaccaggaatcaggtggaggtcgggaatgtaagtccctcggacgactcgttcgattgccacttgctcatcatcataccttatagcgccgtagagcgtttcgttcgggccaacgtccgtttccggttggctcccaaagagtgcagaaaggctcgcttgaggatcgagatcaatggccaagactcgatatccgcgcatagcgaggtactgcgccagatgcgcggcggtggtggtcttacccgacccacctttgaaattcatcacagagataacctgaagctgctcgccgcctcgacgatgtggcaggtagcgccggttcccgcggccgacctgatccatatacttccgaatcacatggatatcttcaattgagaacattcgcctgccacccgggctcatgctaacattcaactctggcatctcagacgcggtctgccgtaaatatgactcgccaacgccgagcagcttggacgcctccgatggcccgaatgttcgaatgcccttctcggaatgcggcgggaaaaccttaagatgatgtgcttgaagttggctcgagagggcatcggcatgacgctccatcaaggccgtcaaccctacaactacaggcgctgcttttaggacagacttcgccatctcaaacccattccttgccagtggcgatatttttcgcgaaactggaaaagttccgccgctggcaattagcgccgattctgctgtttgggcaagagcttttaggttaacagaaggttaacgccctcaggtcgaaaaactccacccaactgttatttgtatttatttccaatgccttagagagattgccatttgaatatgttcatgtattgttttagtgataatcctacaatcgtaacccaaaaagaggtcgccctctgcgcgccgtcgtccaatataggcgaagtcacccttgcgactcaggcggattctaccttgtacacgtgtcgagtggaaaagtcccatgtggatcactccgttgccccgtcgctcaccgtgttggggggaaggtgcacatggctcagttctcaatggaaattatctgcctaaccggctcagttctgcgtagaaaccaacatgcaagctccaccgggtgcaaagcggcagcggcggcaggatatattcaattgtaaatggcttcatgtccgggaaatctacatggatcagcaatgagtatgatggtcaatatggagaaaaagaaagagtaattaccaattttttttcaattcaaaaatgtagatgtccgcagcgttattataaaatgaaagtacattttgataaaacgacaaattacgatccgtcgtatttataggcgaaagcaataaacaaattattctaattcggaaatctttatttcgacgtgtctacattcacgtccaaatgggggcttagatgagaaacttcacgatcgatgcggccctgccggcgcgccactagtcaacaattggccaatctttgttctaaattgctaataaacgaccatttccgtcaattctccttggttgcaacagtctacccgtcaaatgtttactaatttataagtgtgaagtttgaattatgaaagacgaaatcgtattaaaaattcacaagaataaacaactccatagattttcaaaaaaacagtcacgagaaaaaaaccacagtccgtttgtctgctcttctagtttttattatttttctattaatagttttttgttatttcgagaataaaatttgaacgatgtccgaaccacaaaagccgagccgataaatcctaagccgagcctaactttagccgtaaccatcagtcacggctcccgggctaattcatttgaaccgaatcataatcaacggtttagatcaaactcaaaacaatctaacggcaacatagacgcgtcggtgagctaaaaagagtgtgaaagccaggtcaccatagcattgtctctcccagattttttatttgggaaataatagaagaaatagaaaaaaataaaagagtgagaaaaatcgtagagctatatattcgcacatgtactcgtttcgctttccttagtgttagctgctgccgctgttgtttctcctccatttctctatctttctctctcgctgcttctcgaatcttctgtatcatcttcttcttcttcaaggtgagtctctagatccgttcgcttgattttgctgctcgttagtcgttattgttgattctctatgccgatttcgctagatctgtttagcatgcgttgtggttttatgagaaaatctttgttttgggggttgcttgttatgtgattcgatccgtgcttgttggatcgatctgagctaattcttaaggtttatgtgttagatctatggagtttgaggattcttctcgcttctgtcgatctctcgctgttatttttgtttttttcagtgaagtgaagttgtttagttcgaaatgacttcgtgtatgctcgattgatctggttttaatcttcgatctgttaggtgttgatgtttacaagtgaattctagtgttttctcgttgagatctgtgaagtttgaacctagttttctcaataatcaacatatgaagcgatgtttgagtttcaataaacgctgctaatcttcgaaactaagttgtgatctgattcgtgtttacttcatgagcttatccaattcatttcggtttcattttactttttttttagtgaaccatggcgcaagttagcagaatctgcaatggtgtgcagaacccatctcttatctccaatctctcgaaatccagtcaacgcaaatctcccttatcggtttctctgaagacgcagcagcatccacgagcttatccgatttcgtcgtcgtggggattgaagaagagtgggatgacgttaattggctctgagcttcgtcctcttaaggtcatgtcttctgtttccacggcgtgcatgggggaagcggtgatcgccgaagtatcgactcaactatcagaggtagttggcgtcatcgagcgccatctcgaaccgacgttgctggccgtacatttgtacggctccgcagtggatggcggcctgaagccacacagtgatattgatttgctggttacggtgaccgtaaggcttgatgaaacaacgcggcgagctttgatcaacgaccttttggaaacttcggcttcccctggagagagcgagattctccgcgctgtagaagtcaccattgttgtgcacgacgacatcattccgtggcgttatccagctaagcgcgaactgcaatttggagaatggcagcgcaatgacattcttgcaggtatcttcgagccagccacgatcgacattgatctggctatcttgctgacaaaagcaagagaacatagcgttgccttggtaggtccagcggcggaggaactctttgatccggttcctgaacaggatctatttgaggcgctaaatgaaaccttaacgctatggaactcgccgcccgactgggctggcgatgagcgaaatgtagtgcttacgttgtcccgcatttggtacagcgcagtaaccggcaaaatcgcgccgaaggatgtcgctgccgactgggcaatggagcgcctgccggcccagtatcagcccgtcatacttgaagctagacaggcttatcttggacaagaagaagatcgcttggcctcgcgcgcagatcagttggaagaatttgtccactacgtgaaaggcgagatcaccaaggtagtcggcaaataaggatcaattcccgatcgttcaaacatttggcaataaagtttcttaagattgaatcctgttgccggtcttgcgatgattatcatataatttctgttgaattacgttaagcatgtaataattaacatgtaatgcatgacgttatttatgagatgggtttttatgattagagtcccgcaattatacatttaatacgcgatagaaaacaaaatatagcgcgcaaactaggataaattatcgcgcgcggtgtcatctatgttactagatcacgcgtgtatgcaatatcctgcagggtattaattaattatgccctaagacatcctggaccaatatgctgaagattatgctacctacaccaggataggacttgaagcacttaaccttgaagattggttcgaagaaccagaacccgatccacctaaccctgtggaccgccagaggatagaggacatcctggacctactgaacgtcagcaatgacgactgaaagattcccaggacaccggcggaagtggtggacccagtctaggtgcgatgcttagtcgcgcacgatgactatgtcggaaggcatctttgctttcggcaaactttagtaatactttaaggaaagtattgtacaagttaggtgcagagacaataatgcacccagctttagctttgtttatggaattattgtgtcggttgcattattggatgcctgcgtgcaccctaagcaatcaacggagaaacaaagataaaaatcaattactcacatgaaagagtattgatcacgagtcactatggagcgacaatctccagacaggatgtcagcatcttatcttcctttgaagaaagcatcatcaataacgatgtaatggtggggacatccactaagttattgctctgcaaacagctcaaaaagctactggccgacaatcataattgctcggcatgtccaggtggggcctccactagcaataatacaagctttacagcttgcagtgactcatcctccaataatggagaaaaagacgtcagcagtgacgaacaagggtcgaaagacttgcctatataagggcattctcccctcagttgaagatcatcgaaagttggagcaataaactctctcttcaacaaatctatcttttatcttttatcgccgcaatggcgggatctaagaagagaagaattaaacaagattccgacgggatcttttacgactcccgcaactatgaggcgcaagagaatgcgatcctcccgaagaacgccgatgcgaacggggcctataatatcgccaggaaagtgctctgggccatcgggcagttcaaaaaggcggaggatgagaagctcgacaaggtgaaaattgccatttccaacaaggagtggctggagtacgcgcagacctccgtgaagcacggctcctctggcagctccggctctagcggctcctctggcagctccggctccaagctggagaagtttacaaactgttacagcctctccaaaaccctcaggtttaaagcgatcccggtgggcaagacccaggagaacatcgacaacaagaggctcctggtggaagacgagaagcgcgccgaagactacaagggcgtgaagaagctgctcgataggtactacctcagctttattaacgacgtgctgcacagcatcaaactcaagaatctcaacaactacatctccctcttccgcaaaaagacccgcaccgagaaggagaacaaggagctggagaacctggagatcaacctccgcaaggaaatcgccaaagcgttcaagggcaatgaagggtacaagagcctcttcaagaaagacatcatcgaaactatcctcccagagtttctcgatgacaaggacgagatcgcgctggtgaactcctttaacgggttcacaaccgcgtttaccggcttctttgataacagggaaaatatgttctccgaggaggccaagtccaccagcatcgccttcaggtgtatcaacgagaacctcacccgctacatttccaatatggacattttcgagaaggtggatgcgatcttcgataagcacgaggtgcaggagatcaaagagaagattctcaattccgattatgacgtcgaggatttcttcgaaggggagttctttaattttgtgctcacacaagagggcattgacgtgtacaacgcgattatcgggggcttcgtcacagagtccggggagaagattaaggggctgaatgagtacatcaatctgtacaatcagaagaccaagcagaaactgccgaaattcaagccgctctacaagcaagtcctgtccgatagggaaagcctctccttctacggcgagggctataccagcgacgaggaggtgctggaagtcttccgcaacacactgaataagaatagcgagattttctcctccatcaagaagctcgagaagctctttaagaactttgacgagtacagctccgccgggattttcgtgaagaacgggccggcgatcagcaccatctccaaggacatctttggcgagtggaacgtcatcagggacaagtggaacgccgagtacgacgacatccacctgaagaagaaggcggtggtgaccgagaagtatgaggacgatcgcaggaagtccttcaaaaaaatcggctccttcagcctcgaacagctccaggagtatgccgatgcggatctgtccgtcgtcgagaagctgaaggaaatcatcattcagaaggtcgacgagatctataaagtgtacgggtccagcgagaagctgttcgacgccgactttgtgctcgagaagtccctcaaaaagaatgacgccgtggtggccattatgaaagacctgctcgactccgtgaagtccttcgaaaattacattaaagcgttctttggggaggggaaggaaactaacagggatgagtccttctatggcgactttgtcctcgcgtacgacatcctgctgaaggtcgaccacatttacgacgcgatccgcaactacgtgacacagaagccgtactccaaagacaagttcaagctgtacttccagaacccgcaatttatgcgcggctgggacaaggataaagagacagactaccgcgcgacaattctccgctatggctccaaatactatctggccatcatggacaagaagtacgcgaagtgcctgcagaagatcgacaaagacgacgtcaatggcaactatgaaaagatcaactacaagctgctgccgggcccgaacaagatgctcccgagggtgttcttcagcaagaagtggatggcctactacaatccaagcgaggatattcagaaaatctataaaaacgggaccttcaagaagggggacatgtttaacctcaacgactgccacaagctcattgatttcttcaaggatagcatttcccgctacccgaaatggtccaatgcgtacgattttaacttctccgagacagaaaagtacaaagacatcgcgggcttttacagggaggtggaggagcaagggtataaagtttcttttgaatccgcgagcaagaaggaagtcgacaagctcgtcgaggagggcaagctctacatgttccaaatttataacaaggacttttccgacaagagccatgggaccccaaacctccacaccatgtacttcaaactgctctttgacgagaacaaccacgggcaaatcaggctgagcggcggcgccgaattattcatgcgcagggcctccctcaagaaggaagagctggtcgtccatccagccaattccccgatcgcgaacaagaacccggacaatccgaaaaagaccaccaccctgtcctacgacgtctacaaggacaaacgcttcagcgaagaccagtacgaattacacatcccaattgcgattaataagtgcccaaagaatatcttcaaaattaatacagaggtcagggtgctgctcaaacacgacgacaatccgtatgtcatcggcattgacaggggcgagcgcaatctgctctatatcgtggtcgtggatgggaagggcaatattgtggagcagtactccctgaacgagattatcaacaacttcaatgggattaggattaagaccgactatcacagcctgctcgacaagaaagaaaaagagaggtttgaggcccgccaaaactggacctccattgagaatatcaaagaattaaaggccggctatatttcccaagtcgtccacaagatctgcgagctggtggagaaatatgacgccgtgattgcgctcgaagacttaaattctgggttcaagaactcccgcgtgaaggtggaaaaacaggtgtatcagaaattcgagaaaatgctgatcgacaaactcaattatatggtggataagaagtccaacccgtgtgccacagggggcgcgctgaagggctatcagatcaccaacaagttcgagagcttcaagagcatgagcacccagaacgggtttattttctacatcccggcgtggctcacctccaagattgacccgagcaccggcttcgtgaacctcctgaagacaaagtatacctccattgccgacagcaagaagtttatctcctccttcgaccgcattatgtatgtgccggaggaggacctcttcgagttcgccctcgactacaaaaacttcagccgcacagatgcggattacatcaagaagtggaagctgtactcctacgggaacaggatccgcatcttcaggaatccaaaaaaaaataacgtctttgactgggaggaagtgtgcctgacatccgcctacaaggaactgttcaataaatacggcatcaattaccagcagggcgacattcgcgccctcctctgtgagcagtccgacaaagcgttttactccagcttcatggccctcatgtccctgatgctccaaatgaggaatagcatcacagggcgcaccgacgtcgacttcctcatcagcccggtgaagaacggatctaagaagagaagaattaaacaagattgatagaagggctctctgtcatgatttcatactttcattattgagctctgtaattacaattatgaccatgagaacatctcttattgtgtggccttttaattgctgatgttagtactgaaccaaagcttatcgtgatgatgtaaaagcaataagtacttgtttgtagcttctttgtgtctccctttgggcttaatacatctgtttagtgttgtggctttggcatagacttctcttggtaataatgccttgcaatgcaaaatttcaattatcaaattctattatgttctcaccttatggtaacagcttaccctgtggaagatgagattcttgagttgagtcattgccaatttttggcattagcttttgaattagtgaattttgacaaaaattaccgtgacactgattttgttgaagctcttaagtgtagtttttacaaaatttcagtggctcgttgtgattatgtcaaactcacggcgaatgtagttcttacagaatttcagtggctcaaggatttaacgcgtgtatgcggccgcaaactatatcctgcagggtattaattaattatgccaatctgtgaagagtttattcacgattaatctaggaggaagcgcgctttgttggctgtaggcccaaagcagcaatcaacagagtgtgtgagggccagctgctggaaggttcggttttttcaacaggcccacacgcgcgggctgggctgggctgggctggccacgttccttcggtagcagttcggtggagcaacgaggacggtggaatcgaagtttagtaccacctcggctgaagatacggagaaagaccagtttataacctgcctctggagcctgctgctcggtttcaaagattaaataatttctactaagtgtagattgatgaaccagcccgcacgattctaatttctactaagtgtagattactgtcactgttgctggtttggtaatttctactaagtgtagatcaagatacctgcccagcaagcagtaatttctactaagtgtagatagggaagccacgtgtcggcttcttaatttctactaagtgtagataaaatcccgccacgtggcacccttaatttctactaagtgtagatttttttttggatttaacgcgtgtatgcggccgcaacagagaaactagacctgcaggaaggcgccggcgctctcttaaggtagc

SEQ ID NO: 797 - DNA, 15522 bp, synthetic construct
  source 1..15522: mol_type = other DNA
aaggatccctgaaagcgacgttggatgttaacatctacaaattgccttttcttatcgaccatgtacgtaagcgcttacgtttttggtggacccttgaggaaactggtagctgttgtgggcctgtggactcaagatggatcattaatttccaccttcacctacgatggggggcatcgcaccggtgagtaatattgtacggctaagagcgaatttggcctgtagacctcaattgcgagctttctaatttcaaactattcgggcctaacttttggtgtgatgatgctgactggcaggatatataccgttgtaatttgagctcgtgtgaataagtcgctgtgtatgtttgtttgattgtttctgttggagtgcagcccatttcaccggacaagtcggctagattgatttagccctgatgaactgccgaggggaagccatcttgagcgcggaatgggaatggatttcgttgtacaacgacacgacagaacacccacgggaccgagcttcgaagctttaacgcttgagttaagccgcgccgcgaagcggcgtcggcttgaacgaattgttagacatcagaagaactcgtcaagaaggcgatagaaggcgatgcgctgcgaatcgggagcggcgataccgtaaagcacgaggaagcggtcagcccattcgccgccaagctcttcagcaatatcacgggtagccaacgctatgtcctgatagcggtccgccacacccagccggccacagtcgatgaatccagaaaagcggccattttccaccatgatattcggcaagcaggcatcgccatgggtcacgacgagatcctcgccgtcgggcatgcgcgccttgagcctggcgaacagttcggctggcgcgagcccctgatgctcttcgtccagatcatcctgatcgacaagaccggcttccatccgagtacgtgctcgctcgatgcgatgtttcgcttggtggtcgaatgggcaggtagccggatcaagcgtatgcagccgccgcattgcatcagccatgatggatactttctcggcaggagcaaggtgagatgacaggagatcctgccccggcacttcgcccaatagcagccagtcccttcccgcttcagtgacaacgtcgagcacagctgcgcaaggaacgcccgtcgtggccagccacgatagccgcgctgcctcgtcctgcagttcattcagggcaccggacaggtcggtcttgacaaaaagaaccgggcgcccctgcgctgacagccggaacacggcggcatcagagcagccgattgtctgttgtgcccagtcatagccgaatagcctctccacccaagcggccggagaacctgcgtgcaatccatcttgttcaatcatggctttgtttctccttcaatcattgactattgtcacgttattctgaatcgacgagaactcacatcaatctcaacaagcatctctgctcgcgaaattggtgttgtctcattaaaacgtgaccgtcaaagtctattcactaggacccaaatctctccaggtcccgcaagctagcttcgccgcccacgtttctctttcttctcatattcaattgtcaaaaaacagacctcatgaccaaaatcccttaacgtgagttttcgttccactgagcgtcagaccccgtagaaaagatcaaaggatcttcttgagatcctttttttctgcgcgtaatctgctgcttgcaaacaaaaaaaccaccgctaccagcggtggtttgtttgccggatcaagagctaccaactttttttccgaaggtaactggcttcagcagagcgcagataccaaatactgtccttctagtgtagccgtagttaggccaccacttcaagaactctgtagcaccgcctacatacctcgctctgctaatcctgttaccagtggctgctgccagtggcgataagtcgtgtcttaccgggttggactcaagacgatagttaccggataaggcgcagcggtcgggctgaacggggggttcgtgcacacagcccagcttggagcgaacgacctacaccgaactgagatacctacagcgtgagctatgagaaagcgccacgcttcccgaagggagaaaggcggacaggtatccggtaagcggcagggtcggaacaggagagcgcacgagggagcttccagggggaaacgcctggtatctttatagtcctgtcgggtttcgccacctctgacttgagcgtcgatttttgtgatgctcgtcaggggggcggagcctatggaaaaacgccagcaacgcggcctttttacggttcctggccttttgctggccttttgctcacatgttctttcctgcgttatcccctgattctgtggataaccgtattaccgcctttgagtgagctgataccgctcgccgcagccgaacgaccgagcgcagcgagtcagtgagcgaggaagcggaagagcgcctgatgcggtattttctccttacgcatctgtgcggtatttcacaccgcatatggtgcactctcagtacaatctgctctgatgccgcatagttaagccagtatacaggctctccttcacgatcaacgatcggcatggggccttcgtgcttgttgagtaatgttatcgctcccatcagagcacgcttggtactccgggaatcggatggtctgtcgatcatccaaaaaacgctcatgttttcaacctattaggtctgtggtcagctgaccacagaccatcctgctccatactcgctaattctagccaaaccgcaacgtcccctgcccgctagccttcaagagcgccattatcatcgggccaagtgaaaacttcccgagctcgctccgccgtgtcagatctcggagatagcccccgggcgaattgatgaagttcgctcgctccaaaatgcacgccatcgctgctgccgcattctccggtcccattgcctcacacgcgtcttggtaagccgacgggctgacccccagcatagaccgaaccaccaccgcagccgacatgaggtcacgccagctagcaaccgcaccgctcggcccataattgccaatggtcgggcatgctttcaggatcatcccgagggggaacgcttttatcggctcgctccttgcccggtctatttcactcggcttagcgccctgctccttttcagagcgaggttcaagttcattaacggattcgggttttgaattctgtatgtgctgctcgctctgggcagcattggtgctattattttctgaattgtctctaatttccaaccggttgattatctcttcctggagcatccacatctcttcgagaattgactctacatcagcaagcgtcggggcgcgtggaattctacccacaagttccacatagacttcctcgacagcttgccagtcgccctccgctccctcttccatagctgccgtaattagcttccgaacgtcccgtcggcaaatcgtcagactttctttggccatcctgaatgctgctcgatcggccatcacttgctgtgccatcatcgctagctcttcggaccgcgcgagaagcggagacaaatcgaagccaaacgcgcgctcgatctgaccagcgccatccttacgagcgtaacgctttccgttggcgctatccttccggacgatcaagcctgactccacgagcatggcgatgtgcctacgcaaagtcgcgccagccatcccatgcgcccgaagggcaagctgagcattcgacgggaagacgatcagctgtgcctcctgacgcaactccgtttccgggtgaaagctcaatagcgcatcaaggacggcaagactgttggactggattccaagtagttccatggccgcggacgcatctctaaagaccttccacttgtccgctgtcttgccttgtttgatatcggccagcgccgtctggcgccgcacaagcgcaagcgtcattggccgccgcccgaatggcgtcgttacacttcctgtctgcatcatctttcacctttcagcaggcaaaggaaatcagctcaccaaaacggcgctaaaaactcttgacgaggattcgaggaaatgcgattctgttcgcgctagagagacagaagggcttccgcgacggcgacgttgagggggctcttttcttttgcggtttactctccccgtttccgttggttctcagcgtggtacgcttgatacagcgctggcacatgatcgagcacgaaggtcgcaaaatcgggcgtcgccttcctgtcaatcgtgatttccagtttggccttgctctgcgtcacctgtgcaattctggtgccgtctggggtggccatgacctcgggaagtccacgcgcaacccgactgggcttcagactagcgatcaccgccttgaatcgttctgccgatggcagcgcttgaacttcctccgacatagcatatttagccacgtcggccggtgaagaaactttctcaatcagctcggcaagttgttgccaactcggccgtccaacaccaggagcggcaccaatagcatcggtcagttcagaggggagggcgtcgacgagcagaagcatcttggacaaattgctcttgtcgatcgacatcgcggcgatgacaatctctcgagaaaactgcctgttcaggcgatgtgcgaagcgcgccttttcgatgaaggtaagatcttcgcgctcattgttttcctgaccctgtgctacgaccacttgctcgtccgtcagttcgcgaacgaccgctctgaccggaagtccgagttctgaaacggcgcgtagccggcggtggccgaaggcaacctgatatcggcccggctggctcggatgcggtcgcacaaggattgggacttgctgtccttgttcccggatcgaagtaaggagcccgtcaatgtcccctcgcatacgatcctgcacgaaagacggttctattgacgaggcatccaactctatcactgcctgaccttcagcgaggcgccgctcgatctcttcggcacggctaagacgatcgttttgctctcgcagtgcgttaccaatgttcgctgtgagcttcgttgccggatcgcgctccttccttgttacgccgaggagcggcatggagcggttctttgccgtcctattgtcggcgggcgacgtttcaggggcgtcagttgacacgccaaggatgtgcttccggctcatgtgggcctaccccatgcttttttgatcagtgtttcgatctcgtcgttgacggcgttcatcgcctccaaggctcgatcataggtcgagcgcgtgaacaggccacgctccacttcgaatagagtctggtttgtcaggccagcgtccgaaaccgcggtggttttaagcatcggaaaattgaggacattttcgccaaaaatcgaccgcagataacctaccatttggttctgtggtccgtcgctcggttcgaaacgggttatcagatagcgcatccaattaaacttgaacttggcgccagcattctcgatttcacgcaaaaggttcgatgtcattgccagaaactggttcatcgacatcacatccagcatctgcggatggaccgtgacaagaatggacgtcgccgcagtcaatgcggatagcgtgagatacccaagctggggagggcagtcgatgaccacgacgtcatagttatccgcgatatcttcaattacttggctgatgcgaccataaaagagcgtgtcgccctctttgcggttcatcagcgcgcgtggcgtatcgtgttcaaactccatcagctcaaggttaccaggaatcaggtggaggtcgggaatgtaagtccctcggacgactcgttcgattgccacttgctcatcatcataccttatagcgccgtagagcgtttcgttcgggccaacgtccgtttccggttggctcccaaagagtgcagaaaggctcgcttgaggatcgagatcaatggccaagactcgatatccgcgcatagcgaggtactgcgccagatgcgcggcggtggtggtcttacccgacccacctttgaaattcatcacagagataacctgaagctgctcgccgcctcgacgatgtggcaggtagcgccggttcccgcggccgacctgatccatatacttccgaatcacatggatatcttcaattgagaacattcgcctgccacccgggctcatgctaacattcaactctggcatctcagacgcggtctgccgtaaatatgactcgccaacgccgagcagcttggacgcctccgatggcccgaatgttcgaatgcccttctcggaatgcggcgggaaaaccttaagatgatgtgcttgaagttggctcgagagggcatcggcatgacgctccatcaaggccgtcaaccctacaactacaggcgctgcttttaggacagacttcgccatctcaaacccattccttgccagtggcgatatttttcgcgaaactggaaaagttccgccgctggcaattagcgccgattctgctgtttgggcaagagcttttaggttaacagaaggttaacgccctcaggtcgaaaaactccacccaactgttatttgtatttatttccaatgccttagagagattgccatttgaatatgttcatgtattgttttagtgataatcctacaatcgtaacccaaaaagaggtcgccctctgcgcgccgtcgtccaatataggcgaagtcacccttgcgactcaggcggattctaccttgtacacgtgtcgagtggaaaagtcccatgtggatcactccgttgccccgtcgctcaccgtgttggggggaaggtgcacatggctcagttctcaatggaaattatctgcctaaccggctcagttctgcgtagaaaccaacatgcaagctccaccgggtgcaaagcggcagcggcggcaggatatattcaattgtaaatggcttcatgtccgggaaatctacatggatcagcaatgagtatgatggtcaatatggagaaaaagaaagagtaattaccaattttttttcaattcaaaaatgtagatgtccgcagcgttattataaaatgaaagtacattttgataaaacgacaaattacgatccgtcgtatttataggcgaaagcaataaacaaattattctaattcggaaatctttatttcgacgtgtctacattcacgtccaaatgggggcttagatgagaaacttcacgatcgatgcggccctgccggcgcgccactagtcaacaattggccaatctttgttctaaattgctaataaacgaccatttccgtcaattctccttggttgcaacagtctacccgtcaaatgtttactaatttataagtgtgaagtttgaattatgaaagacgaaatcgtattaaaaattcacaagaataaacaactccatagattttcaaaaaaacagtcacgagaaaaaaaccacagtccgtttgtctgctcttctagtttttattatttttctattaatagttttttgttatttcgagaataaaatttgaacgatgtccgaaccacaaaagccgagccgataaatcctaagccgagcctaactttagccgtaaccatcagtcacggctcccgggctaattcatttgaaccgaatcataatcaacggtttagatcaaactcaaaacaatctaacggcaacatagacgcgtcggtgagctaaaaagagtgtgaaagccaggtcaccatagcattgtctctcccagattttttatttgggaaataatagaagaaatagaaaaaaataaaagagtgagaaaaatcgtagagctatatattcgcacatgtactcgtttcgctttccttagtgttagctgctgccgctgttgtttctcctccatttctctatctttctctctcgctgcttctcgaatcttctgtatcatcttcttcttcttcaaggtgagtctctagatccgttcgcttgattttgctgctcgttagtcgttattgttgattctctatgccgatttcgctagatctgtttagcatgcgttgtggttttatgagaaaatctttgttttgggggttgcttgttatgtgattcgatccgtgcttgttggatcgatctgagctaattcttaaggtttatgtgttagatctatggagtttgaggattcttctcgcttctgtcgatctctcgctgttatttttgtttttttcagtgaagtgaagttgtttagttcgaaatgacttcgtgtatgctcgattgatctggttttaatcttcgatctgttaggtgttgatgtttacaagtgaattctagtgttttctcgttgagatctgtgaagtttgaacctagttttctcaataatcaacatatgaagcgatgtttgagtttcaataaacgctgctaatcttcgaaactaagttgtgatctgattcgtgtttacttcatgagcttatccaattcatttcggtttcattttactttttttttagtgaaccatggcgcaagttagcagaatctgcaatggtgtgcagaacccatctcttatctccaatctctcgaaatccagtcaacgcaaatctcccttatcggtttctctgaagacgcagcagcatccacgagcttatccgatttcgtcgtcgtggggattgaagaagagtgggatgacgttaattggctctgagcttcgtcctcttaaggtcatgtcttctgtttccacggcgtgcatgggggaagcggtgatcgccgaagtatcgactcaactatcagaggtagttggcgtcatcgagcgccatctcgaaccgacgttgctggccgtacatttgtacggctccgcagtggatggcggcctgaagccacacagtgatattgatttgctggttacggtgaccgtaaggcttgatgaaacaacgcggcgagctttgatcaacgaccttttggaaacttcggcttcccctggagagagcgagattctccgcgctgtagaagtcaccattgttgtgcacgacgacatcattccgtggcgttatccagctaagcgcgaactgcaatttggagaatggcagcgcaatgacattcttgcaggtatcttcgagccagccacgatcgacattgatctggctatcttgctgacaaaagcaagagaacatagcgttgccttggtaggtccagcggcggaggaactctttgatccggttcctgaacaggatctatttgaggcgctaaatgaaaccttaacgctatggaactcgccgcccgactgggctggcgatgagcgaaatgtagtgcttacgttgtcccgcatttggtacagcgcagtaaccggcaaaatcgcgccgaaggatgtcgctgccgactgggcaatggagcgcctgccggcccagtatcagcccgtcatacttgaagctagacaggcttatcttggacaagaagaagatcgcttggcctcgcgcgcagatcagttggaagaatttgtccactacgtgaaaggcgagatcaccaaggtagtcggcaaataaggatcaattcccgatcgttcaaacatttggcaataaagtttcttaagattgaatcctgttgccggtcttgcgatgattatcatataatttctgttgaattacgttaagcatgtaataattaacatgtaatgcatgacgttatttatgagatgggtttttatgattagagtcccgcaattatacatttaatacgcgatagaaaacaaaatatagcgcgcaaactaggataaattatcgcgcgcggtgtcatctatgttactagatcacgcgtgtatgcaatatcctgcagggtattaattaattatgccctaagacatcctggaccaatatgctgaagattatgctacctacaccaggataggacttgaagcacttaaccttgaagattggttcgaagaaccagaacccgatccacctaaccctgtggaccgccagaggatagaggacatcctggacctactgaacgtcagcaatgacgactgaaagattcccaggacaccggcggaagtggtggacccagtctaggtgcgatgcttagtcgcgcacgatgactatgtcggaaggcatctttgctttcggcaaactttagtaatactttaaggaaagtattgtacaagttaggtgcagagacaataatgcacccagctttagctttgtttatggaattattgtgtcggttgcattattggatgcctgcgtgcaccctaagcaatcaacggagaaacaaagataaaaatcaattactcacatgaaagagtattgatcacgagtcactatggagcgacaatctccagacaggatgtcagcatcttatcttcctttgaagaaagcatcatcaataacgatgtaatggtggggacatccactaagttattgctctgcaaacagctcaaaaagctactggccgacaatcataattgctcggcatgtccaggtggggcctccactagcaataatacaagctttacagcttgcagtgactcatcctccaataatggagaaaaagacgtcagcagtgacgaacaagggtcgaaagacttgcctatataagggcattctcccctcagttgaagatcatcgaaagttggagcaataaactctctcttcaacaaatctatcttttatcttttatcgccgcaatggcgggatctaagaagagaagaattaaacaagattccgacgggatcttttacgactcccgcaactatgaggcgcaagagaatgcgatcctcccgaagaacgccgatgcgaacggggcctataatatcgccaggaaagtgctctgggccatcgggcagttcaaaaaggcggaggatgagaagctcgacaaggtgaaaattgccatttccaacaaggagtggctggagtacgcgcagacctccgtgaagcacggctcctctggcagctccggctctagcggctcctctggcagctccggctccaagctggagaagtttacaaactgttacagcctctccaaaaccctcaggtttaaagcgatcccggtgggcaagacccaggagaacatcgacaacaagaggctcctggtggaagacgagaagcgcgccgaagactacaagggcgtgaagaagctgctcgataggtactacctcagctttattaacgacgtgctgcacagcatcaaactcaagaatctcaacaactacatctccctcttccgcaaaaagacccgcaccgagaaggagaacaaggagctggagaacctggagatcaacctccgcaaggaaatcgccaaagcgttcaagggcaatgaagggtacaagagcctcttcaagaaagacatcatcgaaactatcctcccagagtttctcgatgacaaggacgagatcgcgctggtgaactcctttaacgggttcacaaccgcgtttaccggcttctttgataacagggaaaatatgttctccgaggaggccaagtccaccagcatcgccttcaggtgtatcaacgagaacctcacccgctacatttccaatatggacattttcgagaaggtggatgcgatcttcgataagcacgaggtgcaggagatcaaagagaagattctcaattccgattatgacgtcgaggatttcttcgaaggggagttctttaattttgtgctcacacaagagggcattgacgtgtacaacgcgattatcgggggcttcgtcacagagtccggggagaagattaaggggctgaatgagtacatcaatctgtacaatcagaagaccaagcagaaactgccgaaattcaagccgctctacaagcaagtcctgtccgatagggaaagcctctccttctacggcgagggctataccagcgacgaggaggtgctggaagtcttccgcaacacactgaataagaatagcgagattttctcctccatcaagaagctcgagaagctctttaagaactttgacgagtacagctccgccgggattttcgtgaagaacgggccggcgatcagcaccatctccaaggacatctttggcgagtggaacgtcatcagggacaagtggaacgccgagtacgacgacatccacctgaagaagaaggcggtggtgaccgagaagtatgaggacgatcgcaggaagtccttcaaaaaaatcggctccttcagcctcgaacagctccaggagtatgccgatgcggatctgtccgtcgtcgagaagctgaaggaaatcatcattcagaaggtcgacgagatctataaagtgtacgggtccagcgagaagctgttcgacgccgactttgtgctcgagaagtccctcaaaaagaatgacgccgtggtggccattatgaaagacctgctcgactccgtgaagtccttcgaaaattacattaaagcgttctttggggaggggaaggaaactaacagggatgagtccttctatggcgactttgtcctcgcgtacgacatcctgctgaaggtcgaccacatttacgacgcgatccgcaactacgtgacacagaagccgtactccaaagacaagttcaagctgtacttccagaacccgcaatttatgcgcggctgggacaaggataaagagacagactaccgcgcgacaattctccgctatggctccaaatactatctggccatcatggacaagaagtacgcgaagtgcctgcagaagatcgacaaagacgacgtcaatggcaactatgaaaagatcaactacaagctgctgccgggcccgaacaagatgctcccgagggtgttcttcagcaagaagtggatggcctactacaatccaagcgaggatattcagaaaatctataaaaacgggaccttcaagaagggggacatgtttaacctcaacgactgccacaagctcattgatttcttcaaggatagcatttcccgctacccgaaatggtccaatgcgtacgattttaacttctccgagacagaaaagtacaaagacatcgcgggcttttacagggaggtggaggagcaagggtataaagtttcttttgaatccgcgagcaagaaggaagtcgacaagctcgtcgaggagggcaagctctacatgttccaaatttataacaaggacttttccgacaagagccatgggaccccaaacctccacaccatgtacttcaaactgctctttgacgagaacaaccacgggcaaatcaggctgagcggcggcgccgaattattcatgcgcagggcctccctcaagaaggaagagctggtcgtccatccagccaattccccgatcgcgaacaagaacccggacaatccgaaaaagaccaccaccctgtcctacgacgtctacaaggacaaacgcttcagcgaagaccagtacgaattacacatcccaattgcgattaataagtgcccaaagaatatcttcaaaattaatacagaggtcagggtgctgctcaaacacgacgacaatccgtatgtcatcggcattgacaggggcgagcgcaatctgctctatatcgtggtcgtggatgggaagggcaatattgtggagcagtactccctgaacgagattatcaacaacttcaatgggattaggattaagaccgactatcacagcctgctcgacaagaaagaaaaagagaggtttgaggcccgccaaaactggacctccattgagaatatcaaagaattaaaggccggctatatttcccaagtcgtccacaagatctgcgagctggtggagaaatatgacgccgtgattgcgctcgaagacttaaattctgggttcaagaactcccgcgtgaaggtggaaaaacaggtgtatcagaaattcgagaaaatgctgatcgacaaactcaattatatggtggataagaagtccaacccgtgtgccacagggggcgcgctgaagggctatcagatcaccaacaagttcgagagcttcaagagcatgagcacccagaacgggtttattttctacatcccggcgtggctcacctccaagattgacccgagcaccggcttcgtgaacctcctgaagacaaagtatacctccattgccgacagcaagaagtttatctcctccttcgaccgcattatgtatgtgccggaggaggacctcttcgagttcgccctcgactacaaaaacttcagccgcacagatgcggattacatcaagaagtggaagctgtactcctacgggaacaggatccgcatcttcaggaatccaaaaaaaaataacgtctttgactgggaggaagtgtgcctgacatccgcctacaaggaactgttcaataaatacggcatcaattaccagcagggcgacattcgcgccctcctctgtgagcagtccgacaaagcgttttactccagcttcatggccctcatgtccctgatgctccaaatgaggaatagcatcacagggcgcaccgacgtcgacttcctcatcagcccggtgaagaacggatctaagaagagaagaattaaacaagattgatagaagggctctctgtcatgatttcatactttcattattgagctctgtaattacaattatgaccatgagaacatctcttattgtgtggccttttaattgctgatgttagtactgaaccaaagcttatcgtgatgatgtaaaagcaataagtacttgtttgtagcttctttgtgtctccctttgggcttaatacatctgtttagtgttgtggctttggcatagacttctcttggtaataatgccttgcaatgcaaaatttcaattatcaaattctattatgttctcaccttatggtaacagcttaccctgtggaagatgagattcttgagttgagtcattgccaatttttggcattagcttttgaattagtgaattttgacaaaaattaccgtgacactgattttgttgaagctcttaagtgtagtttttacaaaatttcagtggctcgttgtgattatgtcaaactcacggcgaatgtagttcttacagaatttcagtggctcaaggatttaacgcgtgtatgcggccgcaaactatatcctgcagggtattaattaattatgccaatctgtgaagagtttattcacgattaatctaggaggaagcgcgctttgttggctgtaggcccaaagcagcaatcaacagagtgtgtgagggccagctgctggaaggttcggttttttcaacaggcccacacgcgcgggctgggctgggctgggctggccacgttccttcggtagcagttcggtggagcaacgaggacggtggaatcgaagtttagtaccacctcggctgaagatacggagaaagaccagtttataacctgcctctggagcctgctgctcggtctcttaatttctactaagtgtagatttgtaaccaacatcccctgatgataatttctactaagtgtagattgccatgcactccaagtcccctataatttctactaagtgtagatggaggataagtttgagaactttataatttctactaagtgtagattatgaggacccactgggtttccataatttctactaagtgtagatggtttccaggtcgcggccgttggtaatttctactaagtgtagatttttttttggatttaacgcgtgtatgcggccgcaacagagaaactagacctgcaggaaggcgccggcgctctcttaaggtagc

SEQ ID NO: 798 - protein, 198 aa, synthetic construct
EASPASGPRHLMDPHIFTSNFNNGIGRHKTYLCYEVERLDNGTSVKMDQHRGFLHNQAKNLLCGFYGRHAELRFLDLVPSLQLDPAQIYRVTWFISWSPCFSWGCAGEVRAFLQENTHVRLRIFAARIYDYDPLYKEALQMLRDAGAQVSIMTYDEFKHCWDTFVDHQGCPFQPWDGLDEHSQALSGRLRAILQNQGN

SEQ ID NO: 799 - DNA, 23 bp, synthetic construct
  source 1..23: mol_type = other DNA
accttggagacggcgactctctg

SEQ ID NO: 800 - DNA, 23 bp, synthetic construct
  source 1..23: mol_type = other DNA
agcctcacccctctagccctaca

SEQ ID NO: 801 - DNA, 23 bp, synthetic construct
  source 1..23: mol_type = other DNA
tgtcaccaatcctgtccctagtg

SEQ ID NO: 802 - DNA, 23 bp, synthetic construct
  source 1..23: mol_type = other DNA
tctgtcccctccaccccacagtg

SEQ ID NO: 803 - skipped

SEQ ID NO: 804 - DNA, 23 bp, synthetic construct
  source 1..23: mol_type = other DNA
catgttttgcttaatggttgagt

SEQ ID NO: 805 - DNA, 23 bp, synthetic construct
  source 1..23: mol_type = other DNA
tgagttacaacgaacacctcagg

SEQ ID NO: 806 - DNA, 23 bp, synthetic construct
  source 1..23: mol_type = other DNA
agagccgtgcgaatggggccatg

SEQ ID NO: 807 - DNA, 23 bp, synthetic construct
  source 1..23: mol_type = other DNA
caagggactcaacatcaaaggat

SEQ ID NO: 808 - DNA, 23 bp, synthetic construct
  source 1..23: mol_type = other DNA
ggcagtgtactcagcaaaggttt

SEQ ID NO: 809 - DNA, 2898 bp, synthetic construct
  source 1..2898: mol_type = other DNA
gctagcgagggcctatttcccatgattccttcatatttgcatatacgatacaaggctgttagagagataattggaattaatttgactgtaaacacaaagatattagtacaaaatacgtgacgtagaaagtaataatttcttgggtagtttgcagttttaaaattatgttttaaaatggactatcatatgcttaccgtaacttgaaagtatttcgatttcttggctttatatatcttgtggaaaggacgaaacaccgaatttctactaagtgtagataccttggagacggcgactctctgtttttttgaattctgatgcggtattttctccttacgcatctgtgcggtatttcacaccgcatacgtcaaagcaaccatagtacgcgccctgtagcggcgcattaagcgcggcgggtgtggtggttacgcgcagcgtgaccgctacacttgccagcgccttagcgcccgctcctttcgctttcttcccttcctttctcgccacgttcgccggctttccccgtcaagctctaaatcgggggctccctttagggttccgatttagtgctttacggcacctcgaccccaaaaaacttgatttgggtgatggttcacgtagtgggccatcgccctgatagacggtttttcgccctttgacgttggagtccacgttctttaatagtggactcttgttccaaactggaacaacactcaactctatctcgggctattcttttgatttataagggattttgccgatttcggtctattggttaaaaaatgagctgatttaacaaaaatttaacgcgaattttaacaaaatattaacgtttacaattttatggtgcactctcagtacaatctgctctgatgccgcatagttaagccagccccgacacccgccaacacccgctgacgcgccctgacgggcttgtctgctcccggcatccgcttacagacaagctgtgaccgtctccgggagctgcatgtgtcagaggttttcaccgtcatcaccgaaacgcgcgagacgaaagggcctcgtgatacgcctatttttataggttaatgtcatgataataatggtttcttagacgtcaggtggcacttttcggggaaatgtgcgcggaacccctatttgtttatttttctaaatacattcaaatatgtatccgctcatgagacaataaccctgataaatgcttcaataatattgaaaaaggaagagtatgagtattcaacatttccgtgtcgcccttattcccttttttgcggcattttgccttcctgtttttgctcacccagaaacgctggtgaaagtaaaagatgctgaagatcagttgggtgcacgagtgggttacatcgaactggatctcaacagcggtaagatccttgagagttttcgccccgaagaacgttttccaatgatgagcacttttaaagttctgctatgtggcgcggtattatcccgtattgacgccgggcaagagcaactcggtcgccgcatacactattctcagaatgacttggttgagtactcaccagtcacagaaaagcatcttacggatggcatgacagtaagagaattatgcagtgctgccataaccatgagtgataacactgcggccaacttacttctgacaacgatcggaggaccgaaggagctaaccgcttttttgcacaacatgggggatcatgtaactcgccttgatcgttgggaaccggagctgaatgaagccataccaaacgacgagcgtgacaccacgatgcctgtagcaatggcaacaacgttgcgcaaactattaactggcgaactacttactctagcttcccggcaacaattaatagactggatggaggcggataaagttgcaggaccacttctgcgctcggcccttccggctggctggtttattgctgataaatctggagccggtgagcgtggaagccgcggtatcattgcagcactggggccagatggtaagccctcccgtatcgtagttatctacacgacggggagtcaggcaactatggatgaacgaaatagacagatcgctgagataggtgcctcactgattaagcattggtaactgtcagaccaagtttactcatatatactttagattgatttaaaacttcatttttaatttaaaaggatctaggtgaagatcctttttgataatctcatgaccaaaatcccttaacgtgagttttcgttccactgagcgtcagaccccgtagaaaagatcaaaggatcttcttgagatcctttttttctgcgcgtaatctgctgcttgcaaacaaaaaaaccaccgctaccagcggtggtttgtttgccggatcaagagctaccaactctttttccgaaggtaactggcttcagcagagcgcagataccaaatactgttcttctagtgtagccgtagttaggccaccacttcaagaactctgtagcaccgcctacatacctcgctctgctaatcctgttaccagtggctgctgccagtggcgataagtcgtgtcttaccgggttggactcaagacgatagttaccggataaggcgcagcggtcgggctgaacggggggttcgtgcacacagcccagcttggagcgaacgacctacaccgaactgagatacctacagcgtgagctatgagaaagcgccacgcttcccgaagggagaaaggcggacaggtatccggtaagcggcagggtcggaacaggagagcgcacgagggagcttccagggggaaacgcctggtatctttatagtcctgtcgggtttcgccacctctgacttgagcgtcgatttttgtgatgctcgtcaggggggcggagcctatggaaaaacgccagcaacgcggcctttttacggttcctggccttttgctggccttttgctca

SEQ ID NO: 810 - DNA, 2898 bp, synthetic construct
  source 1..2898: mol_type = other DNA
gctagcgagggcctatttcccatgattccttcatatttgcatatacgatacaaggctgttagagagataattggaattaatttgactgtaaacacaaagatattagtacaaaatacgtgacgtagaaagtaataatttcttgggtagtttgcagttttaaaattatgttttaaaatggactatcatatgcttaccgtaacttgaaagtatttcgatttcttggctttatatatcttgtggaaaggacgaaacaccgaatttctactaagtgtagatagcctcacccctctagccctacatttttttgaattctgatgcggtattttctccttacgcatctgtgcggtatttcacaccgcatacgtcaaagcaaccatagtacgcgccctgtagcggcgcattaagcgcggcgggtgtggtggttacgcgcagcgtgaccgctacacttgccagcgccttagcgcccgctcctttcgctttcttcccttcctttctcgccacgttcgccggctttccccgtcaagctctaaatcgggggctccctttagggttccgatttagtgctttacggcacctcgaccccaaaaaacttgatttgggtgatggttcacgtagtgggccatcgccctgatagacggtttttcgccctttgacgttggagtccacgttctttaatagtggactcttgttccaaactggaacaacactcaactctatctcgggctattcttttgatttataagggattttgccgatttcggtctattggttaaaaaatgagctgatttaacaaaaatttaacgcgaattttaacaaaatattaacgtttacaattttatggtgcactctcagtacaatctgctctgatgccgcatagttaagccagccccgacacccgccaacacccgctgacgcgccctgacgggcttgtctgctcccggcatccgcttacagacaagctgtgaccgtctccgggagctgcatgtgtcagaggttttcaccgtcatcaccgaaacgcgcgagacgaaagggcctcgtgatacgcctatttttataggttaatgtcatgataataatggtttcttagacgtcaggtggcacttttcggggaaatgtgcgcggaacccctatttgtttatttttctaaatacattcaaatatgtatccgctcatgagacaataaccctgataaatgcttcaataatattgaaaaaggaagagtatgagtattcaacatttccgtgtcgcccttattcccttttttgcggcattttgccttcctgtttttgctcacccagaaacgctggtgaaagtaaaagatgctgaagatcagttgggtgcacgagtgggttacatcgaactggatctcaacagcggtaagatccttgagagttttcgccccgaagaacgttttccaatgatgagcacttttaaagttctgctatgtggcgcggtattatcccgtattgacgccgggcaagagcaactcggtcgccgcatacactattctcagaatgacttggttgagtactcaccagtcacagaaaagcatcttacggatggcatgacagtaagagaattatgcagtgctgccataaccatgagtgataacactgcggccaacttacttctgacaacgatcggaggaccgaaggagctaaccgcttttttgcacaacatgggggatcatgtaactcgccttgatcgttgggaaccggagctgaatgaagccataccaaacgacgagcgtgacaccacgatgcctgtagcaatggcaacaacgttgcgcaaactattaactggcgaactacttactctagcttcccggcaacaattaatagactggatggaggcggataaagttgcaggaccacttctgcgctcggcccttccggctggctggtttattgctgataaatctggagccggtgagcgtggaagccgcggtatcattgcagcactggggccagatggtaagccctcccgtatcgtagttatctacacgacggggagtcaggcaactatggatgaacgaaatagacagatcgctgagataggtgcctcactgattaagcattggtaactgtcagaccaagtttactcatatatactttagattgatttaaaacttcatttttaatttaaaaggatctaggtgaagatcctttttgataatctcatgaccaaaatcccttaacgtgagttttcgttccactgagcgtcagaccccgtagaaaagatcaaaggatcttcttgagatcctttttttctgcgcgtaatctgctgcttgcaaacaaaaaaaccaccgctaccagcggtggtttgtttgccggatcaagagctaccaactctttttccgaaggtaactggcttcagcagagcgcagataccaaatactgttcttctagtgtagccgtagttaggccaccacttcaagaactctgtagcaccgcctacatacctcgctctgctaatcctgttaccagtggctgctgccagtggcgataagtcgtgtcttaccgggttggactcaagacgatagttaccggataaggcgcagcggtcgggctgaacggggggttcgtgcacacagcccagcttggagcgaacgacctacaccgaactgagatacctacagcgtgagctatgagaaagcgccacgcttcccgaagggagaaaggcggacaggtatccggtaagcggcagggtcggaacaggagagcgcacgagggagcttccagggggaaacgcctggtatctttatagtcctgtcgggtttcgccacctctgacttgagcgtcgatttttgtgatgctcgtcaggggggcggagcctatggaaaaacgccagcaacgcggcctttttacggttcctggccttttgctggccttttgctca

SEQ ID NO: 811 - DNA, 2898 bp, synthetic construct
  source 1..2898: mol_type = other DNA
gctagcgagggcctatttcccatgattccttcatatttgcatatacgatacaaggctgttagagagataattggaattaatttgactgtaaacacaaagatattagtacaaaatacgtgacgtagaaagtaataatttcttgggtagtttgcagttttaaaattatgttttaaaatggactatcatatgcttaccgtaacttgaaagtatttcgatttcttggctttatatatcttgtggaaaggacgaaacaccgaatttctactaagtgtagattgtcaccaatcctgtccctagtgtttttttgaattctgatgcggtattttctccttacgcatctgtgcggtatttcacaccgcatacgtcaaagcaaccatagtacgcgccctgtagcggcgcattaagcgcggcgggtgtggtggttacgcgcagcgtgaccgctacacttgccagcgccttagcgcccgctcctttcgctttcttcccttcctttctcgccacgttcgccggctttccccgtcaagctctaaatcgggggctccctttagggttccgatttagtgctttacggcacctcgaccccaaaaaacttgatttgggtgatggttcacgtagtgggccatcgccctgatagacggtttttcgccctttgacgttggagtccacgttctttaatagtggactcttgttccaaactggaacaacactcaactctatctcgggctattcttttgatttataagggattttgccgatttcggtctattggttaaaaaatgagctgatttaacaaaaatttaacgcgaattttaacaaaatattaacgtttacaattttatggtgcactctcagtacaatctgctctgatgccgcatagttaagccagccccgacacccgccaacacccgctgacgcgccctgacgggcttgtctgctcccggcatccgcttacagacaagctgtgaccgtctccgggagctgcatgtgtcagaggttttcaccgtcatcaccgaaacgcgcgagacgaaagggcctcgtgatacgcctatttttataggttaatgtcatgataataatggtttcttagacgtcaggtggcacttttcggggaaatgtgcgcggaacccctatttgtttatttttctaaatacattcaaatatgtatccgctcatgagacaataaccctgataaatgcttcaataatattgaaaaaggaagagtatgagtattcaacatttccgtgtcgcccttattcccttttttgcggcattttgccttcctgtttttgctcacccagaaacgctggtgaaagtaaaagatgctgaagatcagttgggtgcacgagtgggttacatcgaactggatctcaacagcggtaagatccttgagagttttcgccccgaagaacgttttccaatgatgagcacttttaaagttctgctatgtggcgcggtattatcccgtattgacgccgggcaagagcaactcggtcgccgcatacactattctcagaatgacttggttgagtactcaccagtcacagaaaagcatcttacggatggcatgacagtaagagaattatgcagtgctgccataaccatgagtgataacactgcggccaacttacttctgacaacgatcggaggaccgaaggagctaaccgcttttttgcacaacatgggggatcatgtaactcgccttgatcgttgggaaccggagctgaatgaagccataccaaacgacgagcgtgacaccacgatgcctgtagcaatggcaacaacgttgcgcaaactattaactggcgaactacttactctagcttcccggcaacaattaatagactggatggaggcggataaagttgcaggaccacttctgcgctcggcccttccggctggctggtttattgctgataaatctggagccggtgagcgtggaagccgcggtatcattgcagcactggggccagatggtaagccctcccgtatcgtagttatctacacgacggggagtcaggcaactatggatgaacgaaatagacagatcgctgagataggtgcctcactgattaagcattggtaactgtcagaccaagtttactcatatatactttagattgatttaaaacttcatttttaatttaaaaggatctaggtgaagatcctttttgataatctcatgaccaaaatcccttaacgtgagttttcgttccactgagcgtcagaccccgtagaaaagatcaaaggatcttcttgagatcctttttttctgcgcgtaatctgctgcttgcaaacaaaaaaaccaccgctaccagcggtggtttgtttgccggatcaagagctaccaactctttttccgaaggtaactggcttcagcagagcgcagataccaaatactgttcttctagtgtagccgtagttaggccaccacttcaagaactctgtagcaccgcctacatacctcgctctgctaatcctgttaccagtggctgctgccagtggcgataagtcgtgtcttaccgggttggactcaagacgatagttaccggataaggcgcagcggtcgggctgaacggggggttcgtgcacacagcccagcttggagcgaacgacctacaccgaactgagatacctacagcgtgagctatgagaaagcgccacgcttcccgaagggagaaaggcggacaggtatccggtaagcggcagggtcggaacaggagagcgcacgagggagcttccagggggaaacgcctggtatctttatagtcctgtcgggtttcgccacctctgacttgagcgtcgatttttgtgatgctcgtcaggggggcggagcctatggaaaaacgccagcaacgcggcctttttacggttcctggccttttgctggccttttgctca

SEQ ID NO: 812 - DNA, 2898 bp, synthetic construct
  source 1..2898: mol_type = other DNA
gctagcgagggcctatttcccatgattccttcatatttgcatatacgatacaaggctgttagagagataattggaattaatttgactgtaaacacaaagatattagtacaaaatacgtgacgtagaaagtaataatttcttgggtagtttgcagttttaaaattatgttttaaaatggactatcatatgcttaccgtaacttgaaagtatttcgatttcttggctttatatatcttgtggaaaggacgaaacaccgaatttctactaagtgtagattctgtcccctccaccccacagtgtttttttgaattctgatgcggtattttctccttacgcatctgtgcggtatttcacaccgcatacgtcaaagcaaccatagtacgcgccctgtagcggcgcattaagcgcggcgggtgtggtggttacgcgcagcgtgaccgctacacttgccagcgccttagcgcccgctcctttcgctttcttcccttcctttctcgccacgttcgccggctttccccgtcaagctctaaatcgggggctccctttagggttccgatttagtgctttacggcacctcgaccccaaaaaacttgatttgggtgatggttcacgtagtgggccatcgccctgatagacggtttttcgccctttgacgttggagtccacgttctttaatagtggactcttgttccaaactggaacaacactcaactctatctcgggctattcttttgatttataagggattttgccgatttcggtctattggttaaaaaatgagctgatttaacaaaaatttaacgcgaattttaacaaaatattaacgtttacaattttatggtgcactctcagtacaatctgctctgatgccgcatagttaagccagccccgacacccgccaacacccgctgacgcgccctgacgggcttgtctgctcccggcatccgcttacagacaagctgtgaccgtctccgggagctgcatgtgtcagaggttttcaccgtcatcaccgaaacgcgcgagacgaaagggcctcgtgatacgcctatttttataggttaatgtcatgataataatggtttcttagacgtcaggtggcacttttcggggaaatgtgcgcggaacccctatttgtttatttttctaaatacattcaaatatgtatccgctcatgagacaataaccctgataaatgcttcaataatattgaaaaaggaagagtatgagtattcaacatttccgtgtcgcccttattcccttttttgcggcattttgccttcctgtttttgctcacccagaaacgctggtgaaagtaaaagatgctgaagatcagttgggtgcacgagtgggttacatcgaactggatctcaacagcggtaagatccttgagagttttcgccccgaagaacgttttccaatgatgagcacttttaaagttctgctatgtggcgcggtattatcccgtattgacgccgggcaagagcaactcggtcgccgcatacactattctcagaatgacttggttgagtactcaccagtcacagaaaagcatcttacggatggcatgacagtaagagaattatgcagtgctgccataaccatgagtgataacactgcggccaacttacttctgacaacgatcggaggaccgaaggagctaaccgcttttttgcacaacatgggggatcatgtaactcgccttgatcgttgggaaccggagctgaatgaagccataccaaacgacgagcgtgacaccacgatgcctgtagcaatggcaacaacgttgcgcaaactattaactggcgaactacttactctagcttcccggcaacaattaatagactggatggaggcggataaagttgcaggaccacttctgcgctcggcccttccggctggctggtttattgctgataaatctggagccggtgagcgtggaagccgcggtatcattgcagcactggggccagatggtaagccctcccgtatcgtagttatctacacgacggggagtcaggcaactatggatgaacgaaatagacagatcgctgagataggtgcctcactgattaagcattggtaactgtcagaccaagtttactcatatatactttagattgatttaaaacttcatttttaatttaaaaggatctaggtgaagatcctttttgataatctcatgaccaaaatcccttaacgtgagttttcgttccactgagcgtcagaccccgtagaaaagatcaaaggatcttcttgagatcctttttttctgcgcgtaatctgctgcttgcaaacaaaaaaaccaccgctaccagcggtggtttgtttgccggatcaagagctaccaactctttttccgaaggtaactggcttcagcagagcgcagataccaaatactgttcttctagtgtagccgtagttaggccaccacttcaagaactctgtagcaccgcctacatacctcgctctgctaatcctgttaccagtggctgctgccagtggcgataagtcgtgtcttaccgggttggactcaagacgatagttaccggataaggcgcagcggtcgggctgaacggggggttcgtgcacacagcccagcttggagcgaacgacctacaccgaactgagatacctacagcgtgagctatgagaaagcgccacgcttcccgaagggagaaaggcggacaggtatccggtaagcggcagggtcggaacaggagagcgcacgagggagcttccagggggaaacgcctggtatctttatagtcctgtcgggtttcgccacctctgacttgagcgtcgatttttgtgatgctcgtcaggggggcggagcctatggaaaaacgccagcaacgcggcctttttacggttcctggccttttgctggccttttgctca

SEQ ID NO: 813 - DNA, 2718 bp, synthetic construct
  source 1..2718: mol_type = other DNA
aggctaggtggaggctcagtgatgataagtctgcgatggtggatgcatgtgtcatggtcatagctgtttcctgtgtgaaattgttatccgctcagagggcacaatcctattccgcgctatccgacaatctccaagacattaggtggagttcagttcggcgtatggcatatgtcgctggaaagaacatgtgagcaaaaggccagcaaaaggccaggaaccgtaaaaaggccgcgttgctggcgtttttccataggctccgcccccctgacgagcatcacaaaaatcgacgctcaagtcagaggtggcgaaacccgacaggactataaagataccaggcgtttccccctggaagctccctcgtgcgctctcctgttccgaccctgccgcttaccggatacctgtccgcctttctcccttcgggaagcgtggcgctttctcatagctcacgctgtaggtatctcagttcggtgtaggtcgttcgctccaagctgggctgtgtgcacgaaccccccgttcagcccgaccgctgcgccttatccggtaactatcgtcttgagtccaacccggtaagacacgacttatcgccactggcagcagccactggtaacaggattagcagagcgaggtatgtaggcggtgctacagagttcttgaagtggtggcctaactacggctacactagaagaacagtatttggtatctgcgctctgctgaagccagttaccttcggaaaaagagttggtagctcttgatccggcaaacaaaccaccgctggtagcggtggtttttttgtttgcaagcagcagattacgcgcagaaaaaaaggatctcaagaagatcctttgatcttttctacggggtctgacgctctattcaacaaagccgccgtcccgtcaagtcagcgtaaatgggtagggggcttcaaatcgtcctcgtgataccaattcggagcctgcttttttgtacaaacttgttgataatggcaattcaaggatcttcacctagatccttttaaattaaaaatgaagttttaaatcaatctaaagtatatatgagtaaacttggtctgacagttaccaatgcttaatcagtgaggcacctatctcagcgatctgtctatttcgttcatccatagttgcctgactccccgtcgtgtagataactacgatacgggagggcttaccatctggccccagtgctgcaatgataccgcgagagccacgctcaccggctccagatttatcagcaataaaccagccagccggaagggccgagcgcagaagtggtcctgcaactttatccgcctccatccagtctattaattgttgccgggaagctagagtaagtagttcgccagttaatagtttgcgcaacgttgttgccattgctacaggcatcgtggtgtcacgctcgtcgtttggtatggcttcattcagctccggttcccaacgatcaaggcgagttacatgatcccccatgttgtgcaaaaaagcggttagctccttcggtcctccgatcgttgtcagaagtaagttggccgcagtgttatcactcatggttatggcagcactgcataattctcttactgtcatgccatccgtaagatgcttttctgtgactggtgagtactcaaccaagtcattctgagaatagtgtatgcggcgaccgagttgctcttgcccggcgtcaatacgggataataccgcgccacatagcagaactttaaaagtgctcatcattggaaaacgttcttcggggcgaaaactctcaaggatcttaccgctgttgagatccagttcgatgtaacccactcgtgcacccaactgatcttcagcatcttttactttcaccagcgtttctgggtgagcaaaaacaggaaggcaaaatgccgcaaaaaagggaataagggcgacacggaaatgttgaatactcatactcttcctttttcaatattattgaagcatttatcagggttattgtctcatgagcggatacatatttgaatgtatttagaaaaataaacaaataggggttccgcgcacatttccccgaaaagtgccagatacctgaaacaaaacccatcgtacggccaaggaagtctccaataactgtgatccaccacaagcgccagggttttcccagtcacgacgttgtaaaacgacggccagtcatgcataatccgcacgcatctggaataaggaagtgccattccgcctgacctgagggcctatttcccatgattccttcatatttgcatatacgatacaaggctgttagagagataattggaattaatttgactgtaaacacaaagatattagtacaaaatacgtgacgtagaaagtaataatttcttgggtagtttgcagttttaaaattatgttttaaaatggactatcatatgcttaccgtaacttgaaagtatttcgatttcttggctttatatatcttgtggaaaggacgaaacaccgaatttctactaagtgtagatgctcagcaggcacctgcctcagcgtttccctcactcctgctcggtgaatttggctcagcaggctgctgcctcagctgctcacttgagcctctgggtctagaaccctctggggaccgtttgaggccggagcagacgatatggcgtcgctccggtttttttgcggccgcctgcagatcgtcgaacgccttagggcattcgatgagatgaccactgacgtatgcggccgc

SEQ ID NO: 814 - DNA, 2689 bp, synthetic construct
  source 1..2689: mol_type = other DNA
gacgaaagggcctcgtgatacgcctatttttataggttaatgtcatgataataatggtttcttagacgtcaggtggcacttttcggggaaatgtgcgcggaacccctatttgtttatttttctaaatacattcaaatatgtatccgctcatgagacaataaccctgataaatgcttcaataatattgaaaaaggaagagtatgagtattcaacatttccgtgtcgcccttattcccttttttgcggcattttgccttcctgtttttgctcacccagaaacgctggtgaaagtaaaagatgctgaagatcagttgggtgcacgagtgggttacatcgaactggatctcaacagcggtaagatccttgagagttttcgccccgaagaacgttttccaatgatgagcacttttaaagttctgctatgtggcgcggtattatcccgtattgacgccgggcaagagcaactcggtcgccgcatacactattctcagaatgacttggttgagtactcaccagtcacagaaaagcatcttacggatggcatgacagtaagagaattatgcagtgctgccataaccatgagtgataacactgcggccaacttacttctgacaacgatcggaggaccgaaggagctaaccgcttttttgcacaacatgggggatcatgtaactcgccttgatcgttgggaaccggagctgaatgaagccataccaaacgacgagcgtgacaccacgatgcctgtagcaatggcaacaacgttgcgcaaactattaactggcgaactacttactctagcttcccggcaacaattaatagactggatggaggcggataaagttgcaggaccacttctgcgctcggcccttccggctggctggtttattgctgataaatctggagccggtgagcgtgggtctcgcggtatcattgcagcactggggccagatggtaagccctcccgtatcgtagttatctacacgacggggagtcaggcaactatggatgaacgaaatagacagatcgctgagataggtgcctcactgattaagcattggtaactgtcagaccaagtttactcatatatactttagattgatttaaaacttcatttttaatttaaaaggatctaggtgaagatcctttttgataatctcatgaccaaaatcccttaacgtgagttttcgttccactgagcgtcagaccccgtagaaaagatcaaaggatcttcttgagatcctttttttctgcgcgtaatctgctgcttgcaaacaaaaaaaccaccgctaccagcggtggtttgtttgccggatcaagagctaccaactctttttccgaaggtaactggcttcagcagagcgcagataccaaatactgttcttctagtgtagccgtagttaggccaccacttcaagaactctgtagcaccgcctacatacctcgctctgctaatcctgttaccagtggctgctgccagtggcgataagtcgtgtcttaccgggttggactcaagacgatagttaccggataaggcgcagcggtcgggctgaacggggggttcgtgcacacagcccagcttggagcgaacgacctacaccgaactgagatacctacagcgtgagctatgagaaagcgccacgcttcccgaagggagaaaggcggacaggtatccggtaagcggcagggtcggaacaggagagcgcacgagggagcttccagggggaaacgcctggtatctttatagtcctgtcgggtttcgccacctctgacttgagcgtcgatttttgtgatgctcgtcaggggggcggagcctatggaaaaacgccagcaacgcggcctttttacggttcctggccttttgctggccttttgctcacatgtgagggcctatttcccatgattccttcatatttgcatatacgatacaaggctgttagagagataattggaattaatttgactgtaaacacaaagatattagtacaaaatacgtgacgtagaaagtaataatttcttgggtagtttgcagttttaaaattatgttttaaaatggactatcatatgcttaccgtaacttgaaagtatttcgatttcttggctttatatatcttgtggaaaggacgaaacaccgtaatttctactcttgtagatcatgttttgcttaatggttgagttttttttgttttagagctagaaatagcaagttaaaataaggctagtccgtttttagcgcgtgcgccaattctgcagacaaatggctctagatgcattcgcgaggtaccgagctcgaattcactggccgtcgttttacaacgtcgtgactgggaaaaccctggcgttacccaacttaatcgccttgcagcacatccccctttcgccagctggcgtaatagcgaagaggcccgcaccgatcgcccttcccaacagttgcgcagcctgaatggcgaatggcgcctgatgcggtattttctccttacgcatctgtgcggtatttcacaccgcatatggtgcactctcagtacaatctgctctgatgccgcatagttaagccagccccgacacccgccaacacccgctgacgcgccctgacgggcttgtctgctcccggcatccgcttacagacaagctgtgaccgtctccgggagctgcatgtgtcagaggttttcaccgtcatcaccgaaacgcgcga

SEQ ID NO: 815 - DNA, 2689 bp, synthetic construct
  source 1..2689: mol_type = other DNA
gacgaaagggcctcgtgatacgcctatttttataggttaatgtcatgataataatggtttcttagacgtcaggtggcacttttcggggaaatgtgcgcggaacccctatttgtttatttttctaaatacattcaaatatgtatccgctcatgagacaataaccctgataaatgcttcaataatattgaaaaaggaagagtatgagtattcaacatttccgtgtcgcccttattcccttttttgcggcattttgccttcctgtttttgctcacccagaaacgctggtgaaagtaaaagatgctgaagatcagttgggtgcacgagtgggttacatcgaactggatctcaacagcggtaagatccttgagagttttcgccccgaagaacgttttccaatgatgagcacttttaaagttctgctatgtggcgcggtattatcccgtattgacgccgggcaagagcaactcggtcgccgcatacactattctcagaatgacttggttgagtactcaccagtcacagaaaagcatcttacggatggcatgacagtaagagaattatgcagtgctgccataaccatgagtgataacactgcggccaacttacttctgacaacgatcggaggaccgaaggagctaaccgcttttttgcacaacatgggggatcatgtaactcgccttgatcgttgggaaccggagctgaatgaagccataccaaacgacgagcgtgacaccacgatgcctgtagcaatggcaacaacgttgcgcaaactattaactggcgaactacttactctagcttcccggcaacaattaatagactggatggaggcggataaagttgcaggaccacttctgcgctcggcccttccggctggctggtttattgctgataaatctggagccggtgagcgtgggtctcgcggtatcattgcagcactggggccagatggtaagccctcccgtatcgtagttatctacacgacggggagtcaggcaactatggatgaacgaaatagacagatcgctgagataggtgcctcactgattaagcattggtaactgtcagaccaagtttactcatatatactttagattgatttaaaacttcatttttaatttaaaaggatctaggtgaagatcctttttgataatctcatgaccaaaatcccttaacgtgagttttcgttccactgagcgtcagaccccgtagaaaagatcaaaggatcttcttgagatcctttttttctgcgcgtaatctgctgcttgcaaacaaaaaaaccaccgctaccagcggtggtttgtttgccggatcaagagctaccaactctttttccgaaggtaactggcttcagcagagcgcagataccaaatactgttcttctagtgtagccgtagttaggccaccacttcaagaactctgtagcaccgcctacatacctcgctctgctaatcctgttaccagtggctgctgccagtggcgataagtcgtgtcttaccgggttggactcaagacgatagttaccggataaggcgcagcggtcgggctgaacggggggttcgtgcacacagcccagcttggagcgaacgacctacaccgaactgagatacctacagcgtgagctatgagaaagcgccacgcttcccgaagggagaaaggcggacaggtatccggtaagcggcagggtcggaacaggagagcgcacgagggagcttccagggggaaacgcctggtatctttatagtcctgtcgggtttcgccacctctgacttgagcgtcgatttttgtgatgctcgtcaggggggcggagcctatggaaaaacgccagcaacgcggcctttttacggttcctggccttttgctggccttttgctcacatgtgagggcctatttcccatgattccttcatatttgcatatacgatacaaggctgttagagagataattggaattaatttgactgtaaacacaaagatattagtacaaaatacgtgacgtagaaagtaataatttcttgggtagtttgcagttttaaaattatgttttaaaatggactatcatatgcttaccgtaacttgaaagtatttcgatttcttggctttatatatcttgtggaaaggacgaaacaccgtaatttctactcttgtagattgagttacaacgaacacctcaggtttttttgttttagagctagaaatagcaagttaaaataaggctagtccgtttttagcgcgtgcgccaattctgcagacaaatggctctagatgcattcgcgaggtaccgagctcgaattcactggccgtcgttttacaacgtcgtgactgggaaaaccctggcgttacccaacttaatcgccttgcagcacatccccctttcgccagctggcgtaatagcgaagaggcccgcaccgatcgcccttcccaacagttgcgcagcctgaatggcgaatggcgcctgatgcggtattttctccttacgcatctgtgcggtatttcacaccgcatatggtgcactctcagtacaatctgctctgatgccgcatagttaagccagccccgacacccgccaacacccgctgacgcgccctgacgggcttgtctgctcccggcatccgcttacagacaagctgtgaccgtctccgggagctgcatgtgtcagaggttttcaccgtcatcaccgaaacgcgcga

SEQ ID NO: 816 - DNA, 2689 bp, synthetic construct
  source 1..2689: mol_type = other DNA
gacgaaagggcctcgtgatacgcctatttttataggttaatgtcatgataataatggtttcttagacgtcaggtggcacttttcggggaaatgtgcgcggaacccctatttgtttatttttctaaatacattcaaatatgtatccgctcatgagacaataaccctgataaatgcttcaataatattgaaaaaggaagagtatgagtattcaacatttccgtgtcgcccttattcccttttttgcggcattttgccttcctgtttttgctcacccagaaacgctggtgaaagtaaaagatgctgaagatcagttgggtgcacgagtgggttacatcgaactggatctcaacagcggtaagatccttgagagttttcgccccgaagaacgttttccaatgatgagcacttttaaagttctgctatgtggcgcggtattatcccgtattgacgccgggcaagagcaactcggtcgccgcatacactattctcagaatgacttggttgagtactcaccagtcacagaaaagcatcttacggatggcatgacagtaagagaattatgcagtgctgccataaccatgagtgataacactgcggccaacttacttctgacaacgatcggaggaccgaaggagctaaccgcttttttgcacaacatgggggatcatgtaactcgccttgatcgttgggaaccggagctgaatgaagccataccaaacgacgagcgtgacaccacgatgcctgtagcaatggcaacaacgttgcgcaaactattaactggcgaactacttactctagcttcccggcaacaattaatagactggatggaggcggataaagttgcaggaccacttctgcgctcggcccttccggctggctggtttattgctgataaatctggagccggtgagcgtgggtctcgcggtatcattgcagcactggggccagatggtaagccctcccgtatcgtagttatctacacgacggggagtcaggcaactatggatgaacgaaatagacagatcgctgagataggtgcctcactgattaagcattggtaactgtcagaccaagtttactcatatatactttagattgatttaaaacttcatttttaatttaaaaggatctaggtgaagatcctttttgataatctcatgaccaaaatcccttaacgtgagttttcgttccactgagcgtcagaccccgtagaaaagatcaaaggatcttcttgagatcctttttttctgcgcgtaatctgctgcttgcaaacaaaaaaaccaccgctaccagcggtggtttgtttgccggatcaagagctaccaactctttttccgaaggtaactggcttcagcagagcgcagataccaaatactgttcttctagtgtagccgtagttaggccaccacttcaagaactctgtagcaccgcctacatacctcgctctgctaatcctgttaccagtggctgctgccagtggcgataagtcgtgtcttaccgggttggactcaagacgatagttaccggataaggcgcagcggtcgggctgaacggggggttcgtgcacacagcccagcttggagcgaacgacctacaccgaactgagatacctacagcgtgagctatgagaaagcgccacgcttcccgaagggagaaaggcggacaggtatccggtaagcggcagggtcggaacaggagagcgcacgagggagcttccagggggaaacgcctggtatctttatagtcctgtcgggtttcgccacctctgacttgagcgtcgatttttgtgatgctcgtcaggggggcggagcctatggaaaaacgccagcaacgcggcctttttacggttcctggccttttgctggccttttgctcacatgtgagggcctatttcccatgattccttcatatttgcatatacgatacaaggctgttagagagataattggaattaatttgactgtaaacacaaagatattagtacaaaatacgtgacgtagaaagtaataatttcttgggtagtttgcagttttaaaattatgttttaaaatggactatcatatgcttaccgtaacttgaaagtatttcgatttcttggctttatatatcttgtggaaaggacgaaacaccgtaatttctactcttgtagatagagccgtgcgaatggggccatgtttttttgttttagagctagaaatagcaagttaaaataaggctagtccgtttttagcgcgtgcgccaattctgcagacaaatggctctagatgcattcgcgaggtaccgagctcgaattcactggccgtcgttttacaacgtcgtgactgggaaaaccctggcgttacccaacttaatcgccttgcagcacatccccctttcgccagctggcgtaatagcgaagaggcccgcaccgatcgcccttcccaacagttgcgcagcctgaatggcgaatggcgcctgatgcggtattttctccttacgcatctgtgcggtatttcacaccgcatatggtgcactctcagtacaatctgctctgatgccgcatagttaagccagccccgacacccgccaacacccgctgacgcgccctgacgggcttgtctgctcccggcatccgcttacagacaagctgtgaccgtctccgggagctgcatgtgtcagaggttttcaccgtcatcaccgaaacgcgcga

SEQ ID NO: 817-839 - skipped (23 entries)

SEQ ID NO: 840 - DNA, 12162 bp, synthetic construct
  source 1..12162: mol_type = other DNA
acacctccgaatattaaaaatattaattattaattttaataaaattcttatttattagtagaaaatattgttcttatttcttattaccatacttatatatgaattaaaagtttaattaatgtgtattgacaatttaaattttttcgacctcattagttaattagaaattatctattacatgatttttaaaataattattataaaatttaataaatttattgtatatcatgatttaaaattaaataataatattaaagagtcttaattttccgttcatgtattatttgtttattcattcgttaattcataattatattataacataataataatatttcaataaaaatcactttatcatgataattaatatgcttttgttacaatcatgataattaatataattactaatgttataaacatttaaaagctaataatgcataatatgactgtatgagatgaaactcatgataggagtataaaagaatgtcaaagtggctgatgtacactttactcttcactttaaggcaacacattttcaaaagcgtccataatccatatttgttttttggtacattacaaaaccaaaagcatccataatccaaatgccatcaaagaaaggaagattaatttatttcaaagtgacggtagatgcaaagacttgcttactttttttatggttagtgtaaaccagttagaattaattatggacgtaatttttaaagtaatcatgatgaaaagataataaatttatcattcattttattaaattagagtgtaattagataaactatttatttattgtttaactaattaatcaatgatcaatatgatttggtatgattgacatataaacttgtctattaaacatgtggtttaaaatatgtttgatcaacatggtattgtttgagttaaattgaattcgattttttaaataatgtctcaatttaaattttgtagatggaaaaaaacatacaaaaagataaattttattataagtgaattaatcagattttcttatagaaattaattattaataaaattattataaataccttacattaaaatctgttttttttcttaaacttcggtaaaatttaattttatttcttacactttcaaattgaatttagttctctaacttttttaaaatatttaaatttagtccatctttaagcttgaactaaatagttattgacatttttttactaccacgaagttaaaagataaattaaatttacatattttaaaagttaaaagactaaatttatcaattaaaaagtatcttactaatcaatgatagaatatcaattaaaaaactaaacagaaaatatttattataaaaatcataagtagcacaaaaaatattatgaataacataattttttcattttaataaaaacttatctactttaacttgcttaaccgtactcaggacacacgtgacattgatgacgttagataccggttagtatttataatttaaaactaaatttaactgagagtttcaaggcaattggaatagagattattgaactcagtgttcgttgtttaatgcaaagaagtaataccatgattgctcatacttgttcattctgatgccttacccaattttgactgtgatataaagttcatgagttttgagcattcacctgcttttgtaggtcatttgttaaattttgatgtaatggaattaccaccctaatatttatttatctataatctccttttaggctttttagcccgctataataataataataataataataataaaaaaggatacgttggtttcactcaaaacattattaatcaacgttgacacctgataattcgcaattatcttccaagggcatttacggaatctacaagacagagaagggcatttccggtaatccacatgggaataaaatccgtgcctggccgccatgtcattatcacagagatttgtgaatggcatttcccagttttttcttttttccattttactctctttctcactcttttctgtgtttttccaatccctcaaaattggacacacaaaaaggtaaagagaaaaaaaaaagtgagagaaagagacccaggtgagaaaaagaatgattcattttcagaatcagaaaaccacttatagaatggaccacacagaaaaaaattgcagtttagagtagtagtgaagtgagtaatatagaaaaaaataaataacaaaaaaaaacaatgttttttgtgtttggttcagttttttgttggttcatcactcactggtcaacaaaggttgcttttttccaccatccttggaacatggtgttgctattttcagcttcttatctcagcaatgagaactgaggaaggggagatactgttggtgtgaaatgcattagtgtagtgccataaacagaaaagagaaatgagagttgcaagagagagggtgagaaaaagaagggctagtactactggtgtatagagtaatagactaatgtattatttaactaattgataattatttttgtgtttttctttattattgtgaagctcatgggagacaagacagtatcaagggaaatcctaaaaattcgattttttttcttatctgttaaataaaaaaagtgacaacagagaaaagtagcataaaaaagtatataaaataataagcagcagtgtgtagtgtagagtgagtgacacagatttggaccaaacaaaacttggttcctctggttcattgtgcatccaccctttctttcctgttacaggtaaacaaacataaacattattgtttctttctttctacaaaaagacctcgttcatttaatactatgactctctctctttcattgggttgtgtgtgtttgtgttttggggtcagtgtctctggtttggaatattatatgcaagagggtgtgtgaactaatttcacgcctacatagcatgattattggttagagttctcttatattttttaatgtgatcctcagtactcaaaagtgtgaaaccaggccaggtattggaggggtgtggtgagggatgtggctctttggaatttgagctgttttcccatcttttgagacccatgcttgtgtgttgagcttggaaagtttcattctttttgttataattctgggtttcttgtctctctttctctctctctatgatttctttttgtcttgggatttttgttgaagtgggttttgcttgttaggagagagaaagagagggaattggtcaatccttcatcatgcttagtgtttgtgcctgccctttctgatgttttgaatcacgcaaaacaatgctatgatgatgcttttacatggagttttgttctgtgaccctttttcttttctagcaccatcagagaaaaaagtgtctgcaattttgtcataactttagtgaaagttaactctactatgtgagcactaactataaatttctctcatcgtggcttctctaaatatagatatgaagggggaagaaggtgagcaagggaacttagcagcccagggaaactagggagagtgtgaatttgcttgctgatgggtcttagcttgaagatgcagaaccaccatcctgtggctttgaggttgcatgatcaaatggggtctaagagaaagtacactttcattcaagctcatagagcttggcttccaaagtttctgctgctgtggatcctgctaatggctttgatcagttggtgcatctatagcaaaatggatgatgacactaaagtcagaaggaaagaggttttgggtagcctctgtgatcaaagggcaagaatgttgcaagaccagtttagtgttagtgttaaccatgtccatgcccttgccatccttgtttcaaccttccattactacagttacccttctgccattgaccaggttagtgcttgatcttccaccctaatcttgatttgacacaagctaagctaagcatgataatttatgttttgatttgaaagaaatgaaatgctatttgggatttttcacacttttacttattgttcaaattgtgtaaataactaaatatctccatccatttgcatgtatcttgactattagtcattgttcataataaaataggaaacctttgctgagtatacagccaggacggcctttgaaaggccattgctgagtggtgtggcctatgcacaaagagttgttaactctgagagggagagatttgagaaagaacatggatgggtcataaagacaatggaaagaaagtcttcactggttagagatgagtatgcgccggtgatcttcgcgcaacaaactgtctcatatcttgagtctattgatatgatgtctggggaggtagattacaacactgcagaacattgttctatttatatattgttaaattttcacttaaatttttgcctttgcatgtttaggaggatcgagaaaacattttaagggctagagccactgggaaagcggttctgactagccctttcaggctgttgggttctcaccatcttggtgtggttttaacattccccgtgtacaaatctaagctcccccagaagccaacagtggaagaacgcattgaagcaactgcagggtcggttttagtttcacttctactttgtttttcaagttttcttctgggatatacatggcgattctttgtgttgtatgacatgtagtgtatagtttttagttgttatccatgtctgttattttcataccctaaataataatgacaacactttgtgtgtcaaatatcacattttttctactaattattgaaagccgctgctgcttctttttccattagatcacaactcttgctaattattaaatgtgtgaccaccacattttaatggtatcagtatcacaatacccctccactttgtgctaccagttttatttgcatcaataccaccttaggtgacattgccatttcccctggtcactatcagtgagtttctggacaactgtggtctatgcaaatggctcaaccatttaactggtaatgtttattaatgaactttttatttaacattgaacatagttaacgaattgaatgtttattatacctagtttaccaataattcctcttctttaaaattgcttgtgttgtgtggtttgcatcctatcttgtctaaaatatagttttaacttttagttttgtagttgcttacatcgacaagcctcttaaccttggttcaatcttgtggctttatgtttactgtaagcttcttagtgtcctaatgtattgaataaatttctaattgacatcagatatgttggaggatcctttgatgttgagtcccttgtaaagaatttacttgggcaacttgatggtaaccaagcaattttggtgaatgtatatgatgttacaaactatactaatcccctaatcatgtatggcaaccaatatcaagaaggcgatatgtctcttgcccatgaaagcaagcttgattttggagatccatacaggaaacatcagatgatatgtaggtaggtgcttctggctgctgtactttttccttaaggagctttaatgttttcacttgtcaactgatgatggttatcatcaaattttgaataggtaccatcagaaggcaccgacaaattggatagctcttaccacggcattcctattctttgtgatactttttttagtgggttacattttatacagtgctggaaatcatattgttaaagtcgaagatgatttccatgaaatgcaggaattgaaagtccgagcagaagcagctgatgttgccaagtcccaggtaattttcctggcatgttgttatcacagttcattatttccaggattacttgctgatcacaattagctaaattttgtttttattttcagtttctagctacggtctctcatgaaattagaacacccatgaatggtattttaggtaacttcaacagtctgcctctctatctcattaacaaaaatgtggcatacactcccataacttgaacatttccattgatgttgatatcatttaactggaaattactgtaggaatgcttgctctgcttctggataccgaattgagttcaacccaacgagattatgctcagactgctcaagcatgcggcaaggcactgataacattaataaatgaggtgctggaccgtgctaaaattgaagctggcaagttagagctggaggctgttccatttgatcttcggtccataattgatgatgtcctttctcttttttctgagaaatctagacacaaaggtttagaggtatgcttcattttttattaacttactacaaatgccatcgcattgttttgcttcgtccaagtttaccattctatttttttaattgatgaacttatactgttctttcatctctttttcacccttttggtgtcttatgccactcgatgttcatgttcctgatgctcatactgaacctcaacctgaactcatattgtcaattgtggaagtaaagctggctgtgtttgtttctgacaaagttccagatattgtcatgggagatcctgggagattcagacaaataataacaaatcttgttggcaactctgttaaagtaagtggaattttcacatctgtcagatgttatttgcatttggaaatgccattctaactgtttcaatcttcttatcttcacttttagatttagccttttgttttcttctttcccccacagtgggcagttgtggaagaaaaaattgatattgatgcttgtatccttcatatttattctttcccttgtatacgttaaatttattcacaaggtacttgttgccttgttgataacattactaattaatttgcacatcttgaagtttactgaacaagggcatatatttgttaaagtccatctagcggacaaccgaaagtccatgatgaatggaaaacacgagacttttctaaatggagaatcagatgaagttttctatatatctggtgattatcatttcaaaaccttaagtggatgtgaagcagctgatgaacggaacagttgggataattttaagcatctaatagctgacaaagaatatggccttgattcttctagagaaacaatggctgcttgtgaatcttccgagcaagtcacattgagggtatgcgtggaggacactggaattggaattcctttctcagctcaggataggatattcatgccatttgtgcaggctgacagctcgacctcacgaaattatgggggtactggaattggcttgagtatcagtaaatgtctggttgagctaatgggtggtcagataaacttcataagtcgaccccaggttgggagcaccttttcttttactgcagtttgtggagcatttaagaaaagttcagttactgacaagaaggaaaatttggaagatctgccttcaaattttagagggatgaaagtcattgtggttgatgggaagcctgttagagcttccgtgactagataccatttgaagagactagggatactagttaaagttgcaaatagcatcagtaaggctgttgctttatgtggtaaaactggttctttgacatcagggtaagttctatttttccctctctattttgattttttttcctgtggacaaaattggtgttaattatgaagaaactgaaagtgataataaacaaagtggtatcatcattttgctattgttgcaacatatgcttgtggttttaataaaaaaaaaccctttaaactgattttgcaagtttattggaaaacatattctgcagttttatcagggtgtatatcccttgctattgccccactactagattttagggtttttgttcgatatataaaaaggcataatggcatagtcatgtctcaattgctaagttttgatatggctatttttcaatcctggcaaggtttcaaatgtattttggttatgtttcagttatcttcaatttgaaatccattcatggcatatttcttgggtgactttacagagcttaatgttgattttgatattttagttgttctagtttttcctttttaaggcttgcatcattcttttaagttatattttggaaactgcttttgactatatttttttttccatgggggaggaagaaaagaaaagaaaatggaagataatatgtttcattattttcatgtctattcagacatcaaatgctaagcggtttgttttaaataagtggatgacattggaagaacatatgctattaagttatttattttttgtttaagttgcttggttcagtttattcactgagtgaaaatacttggatgtggcagaatgttccagcccgatattatcatggttgagaaggacacatggatatctggagaggatggcattttcaatatatggaaacagaatggtcgtatgtttaagatgcctaaaatgatccttctggcaaccaatattattagtgccgaatttgataaagctaaggccacaggttttactgatactgtgatcatgaagcctctgagagctagtatggtggctgcttgtcttcagcaagttttggggatggggaagaggaggcagctagggaaagacatgcctaatggttttctacatagccttctctatggaaagaaaattttggtggtcgatgacaatggggtaaaccggagagttgcagcaggtgcactaaaaaagtttggtgctgatgtgaagtgtgctgaaagtggcaaagccgcacttgaaatgcttcaattgcctcacaattttgatgcttgcttcatggacattcaaatgccagaaatggacgggtatgcatatttatattgattactatttgttcttttcctgctttatttgtttgaaatatttatacttaatgtacttaggaaattgtagattcatgtatcacatgataaatgcaattagtgtccaccagttaattgtagtgtctaggaagttgcactcagttaatattagcctgggacatagcctccaccaagtcttatctacactattatttgtcaagaagcatcatatataacttaggattgaggctattattgactattatgttaacataagctcaaatataaattgtccttttgtactacacagttttgtcttcttaattaatcttggttgttaagaatttagattagatgccttaattaatttacaatgaaaaaaggatggagtagaaggaaaaagtgggtttgcaaaataagatactgatcttagagcattctatatggttcttctcctgaagttccaaccataaaagatgaaccaagctggcaagatgtgaaagtttgaatacatggaattttatacttttaatccatatgtattcataaaagtttgctacatattatattaatgtttttcgttgttggtttgcacacttgttaataatcctcaatgctaaggagaagaaagggtgctagttcatgtgaggaaaattgggatatgcttgcatggacttggggaaaccatctaaatagaggctacacattttgcagatttgaagcaaccagccgaattcggatgatggagagcaaggcaaatgaggagatgaataatgggaatgagtggcatgtgcctatactggccatgacagctgatgtgatccatgctacatacgacaagtgcatgaaatgtggcatggatggatatgtctcaaagccatttgaggaagagaatctgtatcaggaagttgcaaagtttttcaaatcaaaaaccatgtcagattcatgacaaatgtgcttccttacttggcaaccaactagatgattggatttggagacaacacattttagtttgatcactgctagcactttcatgtcacatgtaacttgttacttttgctttcttgcatagagtaacacttgtttttgcaacatatttgagttgagttcgttgagggatcattactattactaatcggctgcagtttggcattattagagtaaaatgtataccacgccacaccccccaattgtgtacagattctgggtaagggatgagtgaaattatgtaaattcaatgtttttccccatctcgttacttccccatcagagaaggtttttaatttttatagcaatagctttttatgtaaagggatcttgtattgtaatagatttggtcactatgttaaaaaatgcatgtttatgtgtagtgtaggatatctttggtgcatggaaaaaggcagtacttactgacagatagaatcgtcttcccccgttatgaaatgagtaatcattcatctgcatatagttacacattttatgtagctgaaatgattttatataggtttacattagtgctcacttagcctcgtaatctaacatgtttgtaaacattactttttaaggtgtctggtttggtggtaaaaaatcacgatgaatgcataatatggtaagcttaccgaaaaaaacaactatttgttgtctctgaaaattgtggtcttcaactcaccaccaatccaatatacacacttggaagtttaagaaaatcacaaacttaatagaattaactactagtttaggctaatacattttaagagatccaatacgtccttttttttctttatctctactgaattataatttagtgcacattcaattgttgttttattcacattatctaatacgaatatgcacgaaacagcgaggtaggttcatttaggcaagcttgatgttaatagtttcttttaggaaaacgactccagttgttacgtggcaacatgttattatcaatttgagtttaatttaaggcttctcctctctttgggatgttttagtgcgttttgggcaaacaatttgagccattggagacattctggtccagatgcacctgattgagggcgatggtgccaaagtcaaatgtagaatatgtaaccaaaaatctgcctaattttccaaattacatgaagatcgtttcttccttacgaatcaaattatgaaggtattcaatattcatgttttggtgagttcctgaccaaaacaattatcaaggtattagtgagtagtacgaaaattgaatttcaaatgagagaaaatatagcattgaaatatattcgtttggtgatttataaaaatataataaatagacattggtaggttaaaaagtatattaacaacggttggacaatagtttgtgcccttaattaagtaatctatggtttgaattctgattgtcctttaagaaattaagtaagttaagaagtgttatattcttgtgttatatagggaaaaaaagtataacataatcttttcattttatttcattcattttggtgcgtgtaccaatttttttcttctgtgcataacttgatatttactttctacttatgtaattttttctgaatgtcaaatagtttgtctcattaatttatattaaaatcacaactgtgaactgacaaaataaacttacactgagaaagaaaataaaataaaattgaaaattcctgaaatgaaagactggttttttctattttgtcatctttgttagaaggtggaaatgaaacaaccattttaagaacaagacgaccaaaacaaacttatacaagaaagttcgttcgcaaaatccattggcattcgttcttgtaacagcataaaataagaaaacagagaaagagaaagtaaagtcaatattcagttataccatttctggtccaaatgcaagtgcctgatgctatttaatctttaaaaaactctatgtttttcatatgaaatttgaagtcaaaatttcattctaatttcaaagcctttattttattttagataataaacggggcacaccaaaagcatattttgatgtctctcaaagttgggaatcaaatatatgaatactacctaacatcacattgattctcccacactcggacatgtacatcaccttttaattagttgctttttgccggccctaatttcggttaattagcaacatatcattgacataaaatatgatcacacaatgggggaaccaaagaggcaagtgaatcaattaatgtaaaatttcataacatcgaaataaacatgtttacattattcctaaaattcacaaaatgtgtattattatttatttataagaattaaataagatccccatgattgaatagccttgtaattgcattaccctcccggcctttgactttcttaacttaccatccacagaacagagaatttttatggtctttaaatacagacattattttttgtagatttcaattgattattgcaaacaaggttggaccttgtctcctcttg

SEQ ID NO: 841 - DNA, 8542 bp, synthetic construct
  source 1..8542: mol_type = other DNA
ccacatgggaataaaatccgtgcctggtcgccgtgtcattatcacacagatttgtgaatggcatttcccagtttttctttttccatttcaacctctttctcactcttttctgtgttcttccgaccccttaaaattggacacacaaaaaggtaaaaagaaaaaaaaagtgagagacccaggggagaaaaaaatgattcattttgagaatcagaaaaccacttatggaccacacagaaaaattgcactctagagcagtagtgaagtgagtaatatagaaaaaataaataacataaaccaaagaaaaaaaaaacagtgttttctgtgtttggttcagtttgttgttggttccatcactcactggtcaacaaaggttgcttttttccatcatcctgtgaacatggtgtttctattttcagcttctcacctcagcaatgagaactgaggaaggggagacactgttggtgtgaaatgcgttagtgttagtgccataaatagaaagagagatatagagaaaatagaaaagagaaaatgagagttgcaagaaagaaagaagggctggtactagtagtagtgtatagactaatgtattacttaattaattaataattatttttgagttttttttttatcatgaagctcgtgggagacgagcgtatcaagggaaatcctacaaattcgattttttcttatctgttaataatataaatataaataaaaaaaagtgacaacagagaaaagtagcataaaataaaagcagcagtgtgtagtgtagagagagagacacggatttggaccaaccaaaatttggttcctatggttcattgtacagccaccctttctttcctgttacaggtaaacaaacataaacattattgtttctttctttccttttttctacaaaaatgcctcattcatttctactaagactctctttcattgggttctgtgtgtttgtgttttggggtcagtgtctctggcttggaatattatatgcaagagggtgtgtgaactagtttcacgcctacatagcatgattattggttagagttctcttgttttttttaatgtgatcctcagtacacaaaagtgtgaaacaaggccaagtattggaggggtgtagggtgagagtgaaagcgaggtggtgagggatgtggtagctctttgaaatttgagctatttccccatcttttgagacccatgcttgtgtgttgagcttggaaagtttcattttttttttgttttaattctgggttacttgtctctctttctctctctctctctctctccctctctctctattgatttctttttgttttggtgatttttgatgaagtgcgttttgcttgttaggagagagaaagagagggaattggccaatccttcattatgcttagtgtgtttgtgcttgccctttctcatgttttgaatcacgcaaaacaatgctgtgatgatgcttttacatggagttttgttctgtgatcccttttcttttctagcaccaacagagaaaagtgtctgcaatttcgtcataactttaaagaaagctaactctactatgtgagcactaactataaatttctcttcttggggcttctctaaggcagaaggtgagcaagggaacataacagcccagggaaactagggagagtgtgaattacttgctgatgggtcttagtttgaagatgcagagccaccatcctgtggctttgaggttacatgatcaaatggggtctaagagaaagtacacattcattcaggctcatagagcttggcttccaaagtttctgctgctgtggatcctgctaatggctttgatcagttggtgcatctatagcaaaatggatgatgacactaaagtccgaaggaaagaggttttgggtagcctctgtgatcaaagggcaagaatgttgcaagaccagtttagtgttagtgttaaccatgtccatgcccttgccatccttgtttcaaccttccattactacagatacccttctgccattgaccaggttagagcttgatcttccactttaatcttgatttgatacaagctaagcatgatattatatgtaatggtttgaaagaaatgaaatgctatttgggattttcacacttctacttattgctcaaattgtgtaaataactaaatatctccatccattgttcataataaaataggaaacctttgctgagtacactgcccggacagcatttgaacggccgttactgagtggtgtggcctatgcgcaaagagttgttaactctgagagggagagatttgagaaagaacatggatgggttataaaaacaatggaaagaaagtcttcactggttagagatgagtatgcaccggtgatattcgcgcaagaaactgtctcatatcttgagtctcttgatatgatgtctggggaggtagattacaacactgccgaacattattctatttactgcttatatattgttaaattttcactcaaaattttgcctttgcatgttcaggaggaccgagaaaacattttaagggctagagccactgggaaggcggttctgactagtcctttcagtcttttgggttctcaccatctcggtgtggttttaacattccctgtgtacaaatctaagctccctcagaagccaacagtggaagaacgcattgaagcaactgcagggtgggttttagtttcacttctatttgtttttcaagttttcttttgtgatatacttggcgattctttgtgttaaatgacatatagtatattttttagttgttatgcttgtatgttattttcataccctaaataataatgacaacactgtgtgtcaaataatatcacatttttctactaatcaatgaaagctgctgcggcttctttctccattagatcatgactgatgctaactattaaagctgtgaccactacattttaatggtatcagtatcacaatacctgccactttgtgctaccagttttatttccatcaataccaccttgggtgccatagccatttcccctgatcactatcagagagtttgaggacaactgttggcgatgcaaatggcacaaccaattaactggttaatgtttattaattaacaatttatttaacattcaatatagttaaccaattaaatttttattattcctattttaccaataattcctcttctttaaaattgttcttttggtttttgtattttcatggccctcaattattgaattcagagctgtatgtaagaggcaggatgcttgtgttgtgtggtttgcatcctgtcctgtctaaaatgtagttttaacttttagttctatagttgcttacatcgacaagcctctttaccttgtttcaatcttgtggctttatgtttacactaagcttcttagtgtcctaatgtattgaataaatttctaattgacatcagatatgttggaggatcctttgatgttgagtcccttgtaaagaatttacttgggcaacttgatggtaaccaagcaattttggtgaatgtatatgatattacaaactatactaatcccctagtcatgtatgggaacctatatgaagaaggcgatatgtctcttgtgcatgaaagcaagcttgattttggagatccatacaggaaacatcagatgatatgtaggtaggtgcttctggctgctgtacttttttctgtaaggacctttaatgtttttacttgtcaactgatagttatcatcaaatttttgaacaggtaccatcagaaggcaccgacaaactggatagctcttaccacggcattcctattctttgtgattctttttttagtgggttacattttatatggtgctggaaaccatattgtcaaagttgaagatgatttccatgcaatggaggaattgaaagtccgagcagaagcagctgatattgccaagtcccaggtaatttttctggcatattgttatcagggttcattatttccaggattacttgctgatcacaattacctaaattttgtttttaatttcagtttctagctacggtctctcatgaaattagaacacccatgaatggtattttaggtaacttcaagaatctgtttctctatcttattaacaaaagtgtgatatatgctttcataacttttgcttttctattgatgttggtatcatttaacttaaaattactgtaggaatgcttgctctgcttctagatacagaattgagttcaacccaacgagattatgctcagactgctcaagcatgtggaaaggcactcataacattaataaatgaggtgcttgaccgtgctaaaattgaagctggcaagctagagctggaggctgttccatttgatcttcgttccataattgatgatgttctttctcttttttctgagaaatctagacacaaaggtttagaggtatgtttaattgttgattaacctactataaatgccatatcataggtttgctttgtcaaagttataaaatttcaccattctatttttttgattgatgaacttatactgttctttcatctctttgtcacctttttggtgtcttatgccactcgattttcatgttcctgatgctcatactgaacctcaacctgaactcatattgtcaattgtggaagtaaagctggctgtgtttgtttctgacaaagttccggatattgtcatgggagatcctgggagattcagacaaataataacaaatcttgttggcaactctgttaaagtaagtggaattttcatagtttgttcatctgttggatgttatttgcatttggaaatgccattctaagtttctaactgtttcaatcttcttcacttttcttctcccccccccccacagtgagcagctgtggaagaaagcattgatattgatgcttgaatccttcatatttattctctcccttgtgtacgccaaattttattcacaaggtacttgttgataacattactaattaatttgcacatcttgcagtttactgaacaagggcatatatttgttaaagttcatctagcagacaatcgaaagtccataatgaatggaaaacacgatacttttctaaatggagaatcagatgaagttttccatatatctggtgattatcatttcaaaaccttaagtggatgtgaagctgccgatgaacggaatagttgggataattttaagcatctaatcgctgacgaagaatatggccttgattcttctagagaaacaatggctgcttgtgaatcttctgagcaagtcaccttgagggtgtgcgtggaggacactggaattggaattcctttctcagctcaggatgggatattcatgccatttgtgcaggctgacagctcaacctcacgaaattatgggggtactggtattggcttgagtatcagtaaatgtctggttgagctaatgggtggtcagataaacttcataagtcgaccccaggttgggagcaccttttcttttactgcagtttgtgaagcatttaagaaaagttcagttaccaacaagaagaaaaatttggaagatctgccttcaagttttagagggatgaaagtcattgtggttgatgggaagcctgttagagctgctgtgactagataccatttgaagagactagggatactagttaaagttgcaaataggatcagtaaggctgttgctttatgtggtaagagtggttctttgaaatcggggtaagttctattattccatctctattttgatttttttttcttatagacagaattggtgttaattatgaagaaactgaaagtgattataaacaaagtggtatcaacattttgctattgttgtaacatatgcttgtgaaaaaaaaaacctttaaattgactttgcaagtttattggaaaacatattctgcagttttatcagggtgtctatcctctgctatggtcccactactagattttagggtttgtgtttgatatataaaaaggcgtaatggcatagtcatgtctcaatggctaagtttcaatgtagctatttttcaatcccagtgaggtttcaaatgtcttttggttatgtttcagttatcttcaatttgaaatcaattcatggtgtatttcttggatgtgcctttacaaagcttaatgttgattttgatattttagttgttctagtttttcctttataaggcttgcattattctttaaagttatatcgtgaaactgcttttgactattttttttttccacgagagagggagtaggggaggaagaaaagaaaagaaaatggaagatactatgtttcattattttcatatttctattcagacatcaaatgctaaggaatttgttttttaataaatgaatgacatttgaagaatatatgctattatttttttcttctatggtttaagttgcttggttcagtttattcactgagtgaaactacttggatgtggcagaatgttccagcctgatattatcatggttgagaaggacacatggataactggagaggatggcattttcaatacatggaaacataatggtcgtacgattaagatgcctaaaatgatccttctggcaaccaatattagtaatgccgaatttgataaagctaagttcacgggtttcactgatactgtgatcatgaagcctctgagagctagtatggtggctgcttgtcttcagcaagttttgggtatggggaagaagaggcagctagggaaagacatgcctaatggttttctacatagccttctctatggaaagaaaattttggtggttgatgacaatggggtaaaccggagggttgcagcaggtgcactaaagaagtttggagctgatgtgaagtgtgctgaaagtggcaaagtcgcccttgaaatgctgcaattgcctcacaattttgatgcttgcttcatggacatccaaatgccagaaatggacgggtacacatttatattggctattattgcttcttttcttgctttatatgttggaaatattttatacttaatagattcgtgtatcacatgataaatgcctttagtgtccacctgttaattgctagtgtctaggaagttgcacttagttaatattagccgggagtatagcctttgtcaagatgcatcacatataacaggattgacgctatgagaaatgctagcgacgctctctttctaacacactctatgattgattgaaatatactaaaaatcaccaattttggtaggactcactcctcatttaataattctttctcttgattaataagtggaaccatcagaattgatgatttccaataaaattcaacctatcatagagagtattagaaagagtgttagagagcgttaaaatcagctcatataaattgcattcctcttgaggctattattgactattatgttaaaataagctcaaatataaattgtacttttgtactacatagctttggcttcgtaattaagcttggttgtaaagatttttgatgcctcattcaatttagaatgaaaaaaggatggagtatagggaaaaagtgggttggcaaaataagatactgatctcacagcattctgtatggttcttctcttcatgttccaaccataaaagatagaccaagctggcaagatgtgaaagttcgaatacatggaattttatacttttaatccatatgtattatcatattatgtattcataagagtttgttacatgtgaggaaaatgtgttgattcatgtgaggaaaattgagatatgcatggacttggggaaaccatctaaacagatgttacacattttgcagatttgaagcaactagtagaattcggatgatggagagcaaggcaaatgaggagatgaatggcagtgagtggcatgtacctatactggccatgacagctgatgtgatccttgctacgtacgacaagtgcgtgaaatgtggcatggatggatacgtctcaaagccatttgaggaagagaatctgtatcaggaagttgcaaagtttttcaaatccaagaccatctcagactcatgacaatgtgctttgaacttggcaaccaactagaagattgattggagacaacacattttagtttttttattttatcattactagcactttcacatgtcacttgtaactagttacttatgcatgctctcatgcctagagtaatgcttgttttcctaacatctttgagttgagttcgttgagggatccttacaattaccaaccggctgcgtttggcattattagagtaaatggtataccacgctacaccccccaattgtgtacagattttgggtaagggatgagtgaaattatgtaaattcaatgtttttccccatctcgttacttccccatcagaaggtttttatagcaatagctttttgtgtaaaggcatcttgtattgtaatagatttggtcattatgttaaaaaatgcatgcttatgtgtagtgtagcatatctttggtgcatgaaaaaatgtagtgcttactaagtgttagaatcgtcttcccttatgaaatttgaagtaatcattcatatgcatatagttaagacaaaattgtaaatttggtctctcattttgtctctaattttg

SEQ ID NO: 842 - protein, 10 aa, synthetic construct
GSKKRRIKQD

SEQ ID NO: 843 - protein, 24 aa, synthetic construct
SGGSKRTADGSEFEPKKKRKVGSG

SEQ ID NO: 844 - protein, 28 aa, synthetic construct
TKYDSGGSKRTADGSEFEPKKKRKVGSG

SEQ ID NO: 845 - DNA, 57 bp, synthetic construct
  source 1..57: mol_type = other DNA
atgaaacggacagccgacggaagcgagttcgagtcaccaaagaagaagcggaaagtc

SEQ ID NO: 846 - DNA, 63 bp, synthetic construct
  source 1..63: mol_type = other DNA
tctggcggctcaaaaagaaccgccgacggcagcgaattcgagcccaagaagaagaggaaagtc

SEQ ID NO: 847 - DNA, 30 bp, synthetic construct
  source 1..30: mol_type = other DNA
ggatctaagaagagaagaattaaacaagat

SEQ ID NO: 848 - DNA, 72 bp, synthetic construct
  source 1..72: mol_type = other DNA
tctggcggctcaaaaagaaccgccgacggcagcgaattcgagcccaagaagaagaggaaagtcggaagcgga

SEQ ID NO: 849 - DNA, 84 bp, synthetic construct
  source 1..84: mol_type = other DNA
actaagtatgattctggcggctcaaaaagaaccgccgacggcagcgaattcgagcccaagaagaagaggaaagtcggaagcgga

SEQ ID NO: 850 - protein, 1228 aa, Synthetic construct
MSKLEKFTNCYSLSKTLRFKAIPVGKTQENIDNKRLLVEDEKRAEDYKGVKKLLDRYYLSFINDVLHSIKLKNLNNYISLFRKKTRTEKENKELENLEINLRKEIAKAFKGNEGYKSLFKKDIIETILPEFLDDKDEIALVNSFNGFTTAFTGFFDNRENMFSEEAKSTSIAFRCINENLTRYISNMDIFEKVDAIFDKHEVQEIKEKILNSDYDVEDFFEGEFFNFVLTQEGIDVYNAIIGGFVTESGEKIKGLNEYINLYNQKTKQKLPKFKPLYKQVLSDRESLSFYGEGYTSDEEVLEVFRNTLNKNSEIFSSIKKLEKLFKNFDEYSSAGIFVKNGPAISTISKDIFGEWNVIRDKWNAEYDDIHLKKKAVVTEKYEDDRRKSFKKIGSFSLEQLQEYADADLSVVEKLKEIIIQKVDEIYKVYGSSEKLFDADFVLEKSLKKNDAVVAIMKDLLDSVKSFENYIKAFFGEGKETNRDESFYGDFVLAYDILLKVDHIYDAIRNYVTQKPYSKDKFKLYFQNPQFMRGWDKDKETDYRATILRYGSKYYLAIMDKKYAKCLQKIDKDDVNGNYEKINYKLLPGPNKMLPRVFFSKKWMAYYNPSEDIQKIYKNGTFKKGDMFNLNDCHKLIDFFKDSISRYPKWSNAYDFNFSETEKYKDIAGFYREVEEQGYKVSFESASKKEVDKLVEEGKLYMFQIYNKDFSDKSHGTPNLHTMYFKLLFDENNHGQIRLSGGAELFMRRASLKKEELVVHPANSPIANKNPDNPKKTTTLSYDVYKDKRFSEDQYELHIPIAINKCPKNIFKINTEVRVLLKHDDNPYVIGIDRGERNLLYIVVVDGKGNIVEQYSLNEIINNFNGIRIKTDYHSLLDKKEKERFEARQNWTSIENIKELKAGYISQVVHKICELVEKYDAVIALEDLNSGFKNSRVKVEKQVYQKFEKMLIDKLNYMVDKKSNPCATGGALKGYQITNKFESFKSMSTQNGFIFYIPAWLTSKIDPSTGFVNLLKTKYTSIADSKKFISSFDRIMYVPEEDLFEFALDYKNFSRTDADYIKKWKLYSYGNRIRIFRNPKKNNVFDWEEVCLTSAYKELFNKYGINYQQGDIRALLCEQSDKAFYSSFMALMSLMLQMRNSITGRTDVDFLISPVKNSDGIFYDSRNYEAQENAILPKNADANGAYNIARKVLWAIGQFKKAEDEKLDKVKIAISNKEWLEYAQTSVKH

SEQ ID NO: 851 - protein, 1228 aa, Synthetic construct
MSKLEKFTNCYSLSKTLRFKAIPVGKTQENIDNKRLLVEDEKRAEDYKGVKKLLDRYYLSFINDVLHSIKLKNLNNYISLFRKKTRTEKENKELENLEINLRKEIAKAFKGNEGYKSLFKKDIIETILPEFLDDKDEIALVNSFNGFTTAFTGFFDNRENMFSEEAKSTSIAFRCINENLTRYISNMDIFEKVDAIFDKHEVQEIKEKILNSDYDVEDFFEGEFFNFVLTQEGIDVYNAIIGGFVTESGEKIKGLNEYINLYNQKTKQKLPKFKPLYKQVLSDRESLSFYGEGYTSDEEVLEVFRNTLNKNSEIFSSIKKLEKLFKNFDEYSSAGIFVKNGPAISTISKDIFGEWNVIRDKWNAEYDDIHLKKKAVVTEKYEDDRRKSFKKIGSFSLEQLQEYADADLSVVEKLKEIIIQKVDEIYKVYGSSEKLFDADFVLEKSLKKNDAVVAIMKDLLDSVKSFENYIKAFFGEGKETNRDESFYGDFVLAYDILLKVDHIYDAIRNYVTQKPYSKDKFKLYFQNPQFMRGWDKDVETDRRATILRYGSKYYLAIMDKKYAKCLQKIDKDDVNGNYEKINYKLLPGPNKMLPKVFFSKKWMAYYNPSEDIQKIYKNGTFKKGDMFNLNDCHKLIDFFKDSISRYPKWSNAYDFNFSETEKYKDIAGFYREVEEQGYKVSFESASKKEVDKLVEEGKLYMFQIYNKDFSDKSHGTPNLHTMYFKLLFDENNHGQIRLSGGAELFMRRASLKKEELVVHPANSPIANKNPDNPKKTTTLSYDVYKDKRFSEDQYELHIPIAINKCPKNIFKINTEVRVLLKHDDNPYVIGIDRGERNLLYIVVVDGKGNIVEQYSLNEIINNFNGIRIKTDYHSLLDKKEKERFEARQNWTSIENIKELKAGYISQVVHKICELVEKYDAVIALEDLNSGFKNSRVKVEKQVYQKFEKMLIDKLNYMVDKKSNPCATGGALKGYQITNKFESFKSMSTQNGFIFYIPAWLTSKIDPSTGFVNLLKTKYTSIADSKKFISSFDRIMYVPEEDLFEFALDYKNFSRTDADYIKKWKLYSYGNRIRIFRNPKKNNVFDWEEVCLTSAYKELFNKYGINYQQGDIRALLCEQSDKAFYSSFMALMSLMLQMRNSITGRTDVDFLISPVKNSDGIFYDSRNYEAQENAILPKNADANGAYNIARKVLWAIGQFKKAEDEKLDKVKIAISNKEWLEYAQTSVKH

SEQ ID NO: 852 - protein, 1228 aa, Synthetic construct
MSKLEKFTNCYSLSKTLRFKAIPVGKTQENIDNKRLLVEDEKRAEDYKGVKKLLDRYYLSFINDVLHSIKLKNLNNYISLFRKKTRTEKENKELENLEINLRKEIAKAFKGNEGYKSLFKKDIIETILPEFLDDKDEIALVNSFNGFTTAFTGFFRNRENMFSEEAKSTSIAFRCINENLTRYISNMDIFEKVDAIFDKHEVQEIKEKILNSDYDVEDFFEGEFFNFVLTQEGIDVYNAIIGGFVTESGEKIKGLNEYINLYNQKTKQKLPKFKPLYKQVLSDRESLSFYGEGYTSDEEVLEVFRNTLNKNSEIFSSIKKLEKLFKNFDEYSSAGIFVKNGPAISTISKDIFGEWNVIRDKWNAEYDDIHLKKKAVVTEKYEDDRRKSFKKIGSFSLEQLQEYADADLSVVEKLKEIIIQKVDEIYKVYGSSEKLFDADFVLEKSLKKNDAVVAIMKDLLDSVKSFENYIKAFFGEGKETNRDESFYGDFVLAYDILLKVDHIYDAIRNYVTQKPYSKDKFKLYFQNPQFMGGWDKDKETDYRATILRYGSKYYLAIMDKKYAKCLQKIDKDDVNGNYEKINYKLLPGPNKMLPKVFFSKKWMAYYNPSEDIQKIYKNGTFKKGDMFNLNDCHKLIDFFKDSISRYPKWSNAYDFNFSETEKYKDIAGFYREVEEQGYKVSFESASKKEVDKLVEEGKLYMFQIYNKDFSDKSHGTPNLHTMYFKLLFDENNHGQIRLSGGAELFMRRASLKKEELVVHPANSPIANKNPDNPKKTTTLSYDVYKDKRFSEDQYELHIPIAINKCPKNIFKINTEVRVLLKHDDNPYVIGIDRGERNLLYIVVVDGKGNIVEQYSLNEIINNFNGIRIKTDYHSLLDKKEKERFEARQNWTSIENIKELKAGYISQVVHKICELVEKYDAVIALEDLNSGFKNSRVKVEKQVYQKFEKMLIDKLNYMVDKKSNPCATGGALKGYQITNKFESFKSMSTQNGFIFYIPAWLTSKIDPSTGFVNLLKTKYTSIADSKKFISSFDRIMYVPEEDLFEFALDYKNFSRTDADYIKKWKLYSYGNRIRIFRNPKKNNVFDWEEVCLTSAYKELFNKYGINYQQGDIRALLCEQSDKAFYSSFMALMSLMLQMRNSITGRTDVDFLISPVKNSDGIFYDSRNYEAQENAILPKNADANGAYNIARKVLWAIGQFKKAEDEKLDKVKIAISNKEWLEYAQTSVKH

SEQ ID NO: 853 - protein, 1376 aa, Synthetic construct
MSKLEKFTNCYSLSKTLRFKAIPVGKTQENIDNKRLLVEDEKRAEDYKGVKKLLDRYYLSFINDVLHSIKLKNLNNYISLFRKKTRTEKENKELENLEINLRKEIAKAFKGNEGYKSLFKKDIIETILPEFLDDKDEIALVNSFNGFTTAFTGFFDNRENMFSEEAKSTSIAFRCINENLTRYISNMDIFEKVDAIFDKHEVQEIKEKILNSDYDVEDFFEGEFFNFVLTQEGIDVYNAIIGGFVTESGEKIKGLNEYINLYNQKTKQKLPKFKPLYKQVLSDRESLSFYGEGSSGENQTTQKGQKNSRERMKRIEEGIKELGSQILKEHPVENTQLQNEKLYLYYLQNGRDMYVDQELDINRLSDYDVDHIVPQSFLKDDSIDNKVLTRSDKNRGKSDNVPSEEVVKKMKNYWRQLLNAKLITQRKFDNLTKAERGGLSGYTSDEEVLEVFRNTLNKNSEIFSSIKKLEKLFKNFDEYSSAGIFVKNGPAISTISKDIFGEWNVIRDKWNAEYDDIHLKKKAVVTEKYEDDRRKSFKKIGSFSLEQLQEYADADLSVVEKLKEIIIQKVDEIYKVYGSSEKLFDADFVLEKSLKKNDAVVAIMKDLLDSVKSFENYIKAFFGEGKETNRDESFYGDFVLAYDILLKVDHIYDAIRNYVTQKPYSKDKFKLYFQNPQFMRGWDKDKETDYRATILRYGSKYYLAIMDKKYAKCLQKIDKDDVNGNYEKINYKLLPGPNKMLPRVFFSKKWMAYYNPSEDIQKIYKNGTFKKGDMFNLNDCHKLIDFFKDSISRYPKWSNAYDFNFSETEKYKDIAGFYREVEEQGYKVSFESASKKEVDKLVEEGKLYMFQIYNKDFSDKSHGTPNLHTMYFKLLFDENNHGQIRLSGGAELFMRRASLKKEELVVHPANSPIANKNPDNPKKTTTLSYDVYKDKRFSEDQYELHIPIAINKCPKNIFKINTEVRVLLKHDDNPYVIGIDRGERNLLYIVVVDGKGNIVEQYSLNEIINNFNGIRIKTDYHSLLDKKEKERFEARQNWTSIENIKELKAGYISQVVHKICELVEKYDAVIALEDLNSGFKNSRVKVEKQVYQKFEKMLIDKLNYMVDKKSNPCATGGALKGYQITNKFESFKSMSTQNGFIFYIPAWLTSKIDPSTGFVNLLKTKYTSIADSKKFISSFDRIMYVPEEDLFEFALDYKNFSRTDADYIKKWKLYSYGNRIRIFRNPKKNNVFDWEEVCLTSAYKELFNKYGINYQQGDIRALLCEQSDKAFYSSFMALMSLMLQMRNSITGRTDVDFLISPVKNSDGIFYDSRNYEAQENAILPKNADANGAYNIARKVLWAIGQFKKAEDEKLDKVKIAISNKEWLEYAQTSVKH

SEQ ID NO: 854 - protein, 1376 aa, Synthetic construct
MSKLEKFTNCYSLSKTLRFKAIPVGKTQENIDNKRLLVEDEKRAEDYKGVKKLLDRYYLSFINDVLHSIKLKNLNNYISLFRKKTRTEKENKELENLEINLRKEIAKAFKGNEGYKSLFKKDIIETILPEFLDDKDEIALVNSFNGFTTAFTGFFDNRENMFSEEAKSTSIAFRCINENLTRYISNMDIFEKVDAIFDKHEVQEIKEKILNSDYDVEDFFEGEFFNFVLTQEGIDVYNAIIGGFVTESGEKIKGLNEYINLYNQKTKQKLPKFKPLYKQVLSDRESLSFYGEGSSGENQTTQKGQKNSRERMKRIEEGIKELGSQILKEHPVENTQLQNEKLYLYYLQNGRDMYVDQELDINRLSDYDVDHIVPQSFLKDDSIDNKVLTRSDKNRGKSDNVPSEEVVKKMKNYWRQLLNAKLITQRKFDNLTKAERGGLSGYTSDEEVLEVFRNTLNKNSEIFSSIKKLEKLFKNFDEYSSAGIFVKNGPAISTISKDIFGEWNVIRDKWNAEYDDIHLKKKAVVTEKYEDDRRKSFKKIGSFSLEQLQEYADADLSVVEKLKEIIIQKVDEIYKVYGSSEKLFDADFVLEKSLKKNDAVVAIMKDLLDSVKSFENYIKAFFGEGKETNRDESFYGDFVLAYDILLKVDHIYDAIRNYVTQKPYSKDKFKLYFQNPQFMRGWDKDVETDRRATILRYGSKYYLAIMDKKYAKCLQKIDKDDVNGNYEKINYKLLPGPNKMLPKVFFSKKWMAYYNPSEDIQKIYKNGTFKKGDMFNLNDCHKLIDFFKDSISRYPKWSNAYDFNFSETEKYKDIAGFYREVEEQGYKVSFESASKKEVDKLVEEGKLYMFQIYNKDFSDKSHGTPNLHTMYFKLLFDENNHGQIRLSGGAELFMRRASLKKEELVVHPANSPIANKNPDNPKKTTTLSYDVYKDKRFSEDQYELHIPIAINKCPKNIFKINTEVRVLLKHDDNPYVIGIDRGERNLLYIVVVDGKGNIVEQYSLNEIINNFNGIRIKTDYHSLLDKKEKERFEARQNWTSIENIKELKAGYISQVVHKICELVEKYDAVIALEDLNSGFKNSRVKVEKQVYQKFEKMLIDKLNYMVDKKSNPCATGGALKGYQITNKFESFKSMSTQNGFIFYIPAWLTSKIDPSTGFVNLLKTKYTSIADSKKFISSFDRIMYVPEEDLFEFALDYKNFSRTDADYIKKWKLYSYGNRIRIFRNPKKNNVFDWEEVCLTSAYKELFNKYGINYQQGDIRALLCEQSDKAFYSSFMALMSLMLQMRNSITGRTDVDFLISPVKNSDGIFYDSRNYEAQENAILPKNADANGAYNIARKVLWAIGQFKKAEDEKLDKVKIAISNKEWLEYAQTSVKH

SEQ ID NO: 855 - protein, 1376 aa, Synthetic construct
MSKLEKFTNCYSLSKTLRFKAIPVGKTQENIDNKRLLVEDEKRAEDYKGVKKLLDRYYLSFINDVLHSIKLKNLNNYISLFRKKTRTEKENKELENLEINLRKEIAKAFKGNEGYKSLFKKDIIETILPEFLDDKDEIALVNSFNGFTTAFTGFFRNRENMFSEEAKSTSIAFRCINENLTRYISNMDIFEKVDAIFDKHEVQEIKEKILNSDYDVEDFFEGEFFNFVLTQEGIDVYNAIIGGFVTESGEKIKGLNEYINLYNQKTKQKLPKFKPLYKQVLSDRESLSFYGEGSSGENQTTQKGQKNSRERMKRIEEGIKELGSQILKEHPVENTQLQNEKLYLYYLQNGRDMYVDQELDINRLSDYDVDHIVPQSFLKDDSIDNKVLTRSDKNRGKSDNVPSEEVVKKMKNYWRQLLNAKLITQRKFDNLTKAERGGLSGYTSDEEVLEVFRNTLNKNSEIFSSIKKLEKLFKNFDEYSSAGIFVKNGPAISTISKDIFGEWNVIRDKWNAEYDDIHLKKKAVVTEKYEDDRRKSFKKIGSFSLEQLQEYADADLSVVEKLKEIIIQKVDEIYKVYGSSEKLFDADFVLEKSLKKNDAVVAIMKDLLDSVKSFENYIKAFFGEGKETNRDESFYGDFVLAYDILLKVDHIYDAIRNYVTQKPYSKDKFKLYFQNPQFMGGWDKDKETDYRATILRYGSKYYLAIMDKKYAKCLQKIDKDDVNGNYEKINYKLLPGPNKMLPKVFFSKKWMAYYNPSEDIQKIYKNGTFKKGDMFNLNDCHKLIDFFKDSISRYPKWSNAYDFNFSETEKYKDIAGFYREVEEQGYKVSFESASKKEVDKLVEEGKLYMFQIYNKDFSDKSHGTPNLHTMYFKLLFDENNHGQIRLSGGAELFMRRASLKKEELVVHPANSPIANKNPDNPKKTTTLSYDVYKDKRFSEDQYELHIPIAINKCPKNIFKINTEVRVLLKHDDNPYVIGIDRGERNLLYIVVVDGKGNIVEQYSLNEIINNFNGIRIKTDYHSLLDKKEKERFEARQNWTSIENIKELKAGYISQVVHKICELVEKYDAVIALEDLNSGFKNSRVKVEKQVYQKFEKMLIDKLNYMVDKKSNPCATGGALKGYQITNKFESFKSMSTQNGFIFYIPAWLTSKIDPSTGFVNLLKTKYTSIADSKKFISSFDRIMYVPEEDLFEFALDYKNFSRTDADYIKKWKLYSYGNRIRIFRNPKKNNVFDWEEVCLTSAYKELFNKYGINYQQGDIRALLCEQSDKAFYSSFMALMSLMLQMRNSITGRTDVDFLISPVKNSDGIFYDSRNYEAQENAILPKNADANGAYNIARKVLWAIGQFKKAEDEKLDKVKIAISNKEWLEYAQTSVKH

SEQ ID NO: 856 - protein, 1372 aa, Synthetic construct
MSKLEKFTNCYSLSKTLRFKAIPVGKTQENIDNKRLLVEDEKRAEDYKGVKKLLDRYYLSFINDVLHSIKLKNLNNYISLFRKKTRTEKENKELENLEINLRKEIAKAFKGNEGYKSLFKKDIIETILPEFLDDKDEIALVNSFNGFTTAFTGFFDNRENMFSEEAKSTSIAFRCINENLTRYISNMDIFEKVDAIFDKHEVQEIKEKILNSDYDVEDFFEGEFFNFVLTQEGIDVYNAIIGGFVTESGEKIKGLNEYINLYNQKTKQKLPKFKPLYKQVLSDRESLSFYGENQTTQKGQKNSRERMKRIEEGIKELGSQILKEHPVENTQLQNEKLYLYYLQNGRDMYVDQELDINRLSDYDVDHIVPQSFLKDDSIDNKVLTRSDKNRGKSDNVPSEEVVKKMKNYWRQLLNAKLITQRKFDNLTKAERGGLSEGYTSDEEVLEVFRNTLNKNSEIFSSIKKLEKLFKNFDEYSSAGIFVKNGPAISTISKDIFGEWNVIRDKWNAEYDDIHLKKKAVVTEKYEDDRRKSFKKIGSFSLEQLQEYADADLSVVEKLKEIIIQKVDEIYKVYGSSEKLFDADFVLEKSLKKNDAVVAIMKDLLDSVKSFENYIKAFFGEGKETNRDESFYGDFVLAYDILLKVDHIYDAIRNYVTQKPYSKDKFKLYFQNPQFMRGWDKDKETDYRATILRYGSKYYLAIMDKKYAKCLQKIDKDDVNGNYEKINYKLLPGPNKMLPRVFFSKKWMAYYNPSEDIQKIYKNGTFKKGDMFNLNDCHKLIDFFKDSISRYPKWSNAYDFNFSETEKYKDIAGFYREVEEQGYKVSFESASKKEVDKLVEEGKLYMFQIYNKDFSDKSHGTPNLHTMYFKLLFDENNHGQIRLSGGAELFMRRASLKKEELVVHPANSPIANKNPDNPKKTTTLSYDVYKDKRFSEDQYELHIPIAINKCPKNIFKINTEVRVLLKHDDNPYVIGIDRGERNLLYIVVVDGKGNIVEQYSLNEIINNFNGIRIKTDYHSLLDKKEKERFEARQNWTSIENIKELKAGYISQVVHKICELVEKYDAVIALEDLNSGFKNSRVKVEKQVYQKFEKMLIDKLNYMVDKKSNPCATGGALKGYQITNKFESFKSMSTQNGFIFYIPAWLTSKIDPSTGFVNLLKTKYTSIADSKKFISSFDRIMYVPEEDLFEFALDYKNFSRTDADYIKKWKLYSYGNRIRIFRNPKKNNVFDWEEVCLTSAYKELFNKYGINYQQGDIRALLCEQSDKAFYSSFMALMSLMLQMRNSITGRTDVDFLISPVKNSDGIFYDSRNYEAQENAILPKNADANGAYNIARKVLWAIGQFKKAEDEKLDKVKIAISNKEWLEYAQTSVKH

SEQ ID NO: 857 - protein, 1372 aa, Synthetic construct
MSKLEKFTNCYSLSKTLRFKAIPVGKTQENIDNKRLLVEDEKRAEDYKGVKKLLDRYYLSFINDVLHSIKLKNLNNYISLFRKKTRTEKENKELENLEINLRKEIAKAFKGNEGYKSLFKKDIIETILPEFLDDKDEIALVNSFNGFTTAFTGFFDNRENMFSEEAKSTSIAFRCINENLTRYISNMDIFEKVDAIFDKHEVQEIKEKILNSDYDVEDFFEGEFFNFVLTQEGIDVYNAIIGGFVTESGEKIKGLNEYINLYNQKTKQKLPKFKPLYKQVLSDRESLSFYGENQTTQKGQKNSRERMKRIEEGIKELGSQILKEHPVENTQLQNEKLYLYYLQNGRDMYVDQELDINRLSDYDVDHIVPQSFLKDDSIDNKVLTRSDKNRGKSDNVPSEEVVKKMKNYWRQLLNAKLITQRKFDNLTKAERGGLSEGYTSDEEVLEVFRNTLNKNSEIFSSIKKLEKLFKNFDEYSSAGIFVKNGPAISTISKDIFGEWNVIRDKWNAEYDDIHLKKKAVVTEKYEDDRRKSFKKIGSFSLEQLQEYADADLSVVEKLKEIIIQKVDEIYKVYGSSEKLFDADFVLEKSLKKNDAVVAIMKDLLDSVKSFENYIKAFFGEGKETNRDESFYGDFVLAYDILLKVDHIYDAIRNYVTQKPYSKDKFKLYFQNPQFMRGWDKDVETDRRATILRYGSKYYLAIMDKKYAKCLQKIDKDDVNGNYEKINYKLLPGPNKMLPKVFFSKKWMAYYNPSEDIQKIYKNGTFKKGDMFNLNDCHKLIDFFKDSISRYPKWSNAYDFNFSETEKYKDIAGFYREVEEQGYKVSFESASKKEVDKLVEEGKLYMFQIYNKDFSDKSHGTPNLHTMYFKLLFDENNHGQIRLSGGAELFMRRASLKKEELVVHPANSPIANKNPDNPKKTTTLSYDVYKDKRFSEDQYELHIPIAINKCPKNIFKINTEVRVLLKHDDNPYVIGIDRGERNLLYIVVVDGKGNIVEQYSLNEIINNFNGIRIKTDYHSLLDKKEKERFEARQNWTSIENIKELKAGYISQVVHKICELVEKYDAVIALEDLNSGFKNSRVKVEKQVYQKFEKMLIDKLNYMVDKKSNPCATGGALKGYQITNKFESFKSMSTQNGFIFYIPAWLTSKIDPSTGFVNLLKTKYTSIADSKKFISSFDRIMYVPEEDLFEFALDYKNFSRTDADYIKKWKLYSYGNRIRIFRNPKKNNVFDWEEVCLTSAYKELFNKYGINYQQGDIRALLCEQSDKAFYSSFMALMSLMLQMRNSITGRTDVDFLISPVKNSDGIFYDSRNYEAQENAILPKNADANGAYNIARKVLWAIGQFKKAEDEKLDKVKIAISNKEWLEYAQTSVKH

SEQ ID NO: 858 - protein, 1372 aa, Synthetic construct
MSKLEKFTNCYSLSKTLRFKAIPVGKTQENIDNKRLLVEDEKRAEDYKGVKKLLDRYYLSFINDVLHSIKLKNLNNYISLFRKKTRTEKENKELENLEINLRKEIAKAFKGNEGYKSLFKKDIIETILPEFLDDKDEIALVNSFNGFTTAFTGFFRNRENMFSEEAKSTSIAFRCINENLTRYISNMDIFEKVDAIFDKHEVQEIKEKILNSDYDVEDFFEGEFFNFVLTQEGIDVYNAIIGGFVTESGEKIKGLNEYINLYNQKTKQKLPKFKPLYKQVLSDRESLSFYGENQTTQKGQKNSRERMKRIEEGIKELGSQILKEHPVENTQLQNEKLYLYYLQNGRDMYVDQELDINRLSDYDVDHIVPQSFLKDDSIDNKVLTRSDKNRGKSDNVPSEEVVKKMKNYWRQLLNAKLITQRKFDNLTKAERGGLSEGYTSDEEVLEVFRNTLNKNSEIFSSIKKLEKLFKNFDEYSSAGIFVKNGPAISTISKDIFGEWNVIRDKWNAEYDDIHLKKKAVVTEKYEDDRRKSFKKIGSFSLEQLQEYADADLSVVEKLKEIIIQKVDEIYKVYGSSEKLFDADFVLEKSLKKNDAVVAIMKDLLDSVKSFENYIKAFFGEGKETNRDESFYGDFVLAYDILLKVDHIYDAIRNYVTQKPYSKDKFKLYFQNPQFMGGWDKDKETDYRATILRYGSKYYLAIMDKKYAKCLQKIDKDDVNGNYEKINYKLLPGPNKMLPKVFFSKKWMAYYNPSEDIQKIYKNGTFKKGDMFNLNDCHKLIDFFKDSISRYPKWSNAYDFNFSETEKYKDIAGFYREVEEQGYKVSFESASKKEVDKLVEEGKLYMFQIYNKDFSDKSHGTPNLHTMYFKLLFDENNHGQIRLSGGAELFMRRASLKKEELVVHPANSPIANKNPDNPKKTTTLSYDVYKDKRFSEDQYELHIPIAINKCPKNIFKINTEVRVLLKHDDNPYVIGIDRGERNLLYIVVVDGKGNIVEQYSLNEIINNFNGIRIKTDYHSLLDKKEKERFEARQNWTSIENIKELKAGYISQVVHKICELVEKYDAVIALEDLNSGFKNSRVKVEKQVYQKFEKMLIDKLNYMVDKKSNPCATGGALKGYQITNKFESFKSMSTQNGFIFYIPAWLTSKIDPSTGFVNLLKTKYTSIADSKKFISSFDRIMYVPEEDLFEFALDYKNFSRTDADYIKKWKLYSYGNRIRIFRNPKKNNVFDWEEVCLTSAYKELFNKYGINYQQGDIRALLCEQSDKAFYSSFMALMSLMLQMRNSITGRTDVDFLISPVKNSDGIFYDSRNYEAQENAILPKNADANGAYNIARKVLWAIGQFKKAEDEKLDKVKIAISNKEWLEYAQTSVKH

SEQ ID NO: 859 - protein, 1374 aa, Synthetic construct
MSKLEKFTNCYSLSKTLRFKAIPVGKTQENIDNKRLLVEDEKRAEDYKGVKKLLDRYYLSFINDVLHSIKLKNLNNYISLFRKKTRTEKENKELENLEINLRKEIAKAFKGNEGYKSLFKKDIIETILPEFLDDKDEIALVNSFNGFTTAFTGFFDNRENMFSEEAKSTSIAFRCINENLTRYISNMDIFEKVDAIFDKHEVQEIKEKILNSDYDVEDFFEGEFFNFVLTQEGIDVYNAIIGGFVTESGEKIKGLNEYINLYNQKTKQKLPKFKPLYKQVLSDRESLSFYGSGENQTTQKGQKNSRERMKRIEEGIKELGSQILKEHPVENTQLQNEKLYLYYLQNGRDMYVDQELDINRLSDYDVDHIVPQSFLKDDSIDNKVLTRSDKNRGKSDNVPSEEVVKKMKNYWRQLLNAKLITQRKFDNLTKAERGGLSEGYTSDEEVLEVFRNTLNKNSEIFSSIKKLEKLFKNFDEYSSAGIFVKNGPAISTISKDIFGEWNVIRDKWNAEYDDIHLKKKAVVTEKYEDDRRKSFKKIGSFSLEQLQEYADADLSVVEKLKEIIIQKVDEIYKVYGSSEKLFDADFVLEKSLKKNDAVVAIMKDLLDSVKSFENYIKAFFGEGKETNRDESFYGDFVLAYDILLKVDHIYDAIRNYVTQKPYSKDKFKLYFQNPQFMRGWDKDKETDYRATILRYGSKYYLAIMDKKYAKCLQKIDKDDVNGNYEKINYKLLPGPNKMLPRVFFSKKWMAYYNPSEDIQKIYKNGTFKKGDMFNLNDCHKLIDFFKDSISRYPKWSNAYDFNFSETEKYKDIAGFYREVEEQGYKVSFESASKKEVDKLVEEGKLYMFQIYNKDFSDKSHGTPNLHTMYFKLLFDENNHGQIRLSGGAELFMRRASLKKEELVVHPANSPIANKNPDNPKKTTTLSYDVYKDKRFSEDQYELHIPIAINKCPKNIFKINTEVRVLLKHDDNPYVIGIDRGERNLLYIVVVDGKGNIVEQYSLNEIINNFNGIRIKTDYHSLLDKKEKERFEARQNWTSIENIKELKAGYISQVVHKICELVEKYDAVIALEDLNSGFKNSRVKVEKQVYQKFEKMLIDKLNYMVDKKSNPCATGGALKGYQITNKFESFKSMSTQNGFIFYIPAWLTSKIDPSTGFVNLLKTKYTSIADSKKFISSFDRIMYVPEEDLFEFALDYKNFSRTDADYIKKWKLYSYGNRIRIFRNPKKNNVFDWEEVCLTSAYKELFNKYGINYQQGDIRALLCEQSDKAFYSSFMALMSLMLQMRNSITGRTDVDFLISPVKNSDGIFYDSRNYEAQENAILPKNADANGAYNIARKVLWAIGQFKKAEDEKLDKVKIAISNKEWLEYAQTSVKH

SEQ ID NO: 860 - protein, 1374 aa, Synthetic construct
MSKLEKFTNCYSLSKTLRFKAIPVGKTQENIDNKRLLVEDEKRAEDYKGVKKLLDRYYLSFINDVLHSIKLKNLNNYISLFRKKTRTEKENKELENLEINLRKEIAKAFKGNEGYKSLFKKDIIETILPEFLDDKDEIALVNSFNGFTTAFTGFFDNRENMFSEEAKSTSIAFRCINENLTRYISNMDIFEKVDAIFDKHEVQEIKEKILNSDYDVEDFFEGEFFNFVLTQEGIDVYNAIIGGFVTESGEKIKGLNEYINLYNQKTKQKLPKFKPLYKQVLSDRESLSFYGSGENQTTQKGQKNSRERMKRIEEGIKELGSQILKEHPVENTQLQNEKLYLYYLQNGRDMYVDQELDINRLSDYDVDHIVPQSFLKDDSIDNKVLTRSDKNRGKSDNVPSEEVVKKMKNYWRQLLNAKLITQRKFDNLTKAERGGLSEGYTSDEEVLEVFRNTLNKNSEIFSSIKKLEKLFKNFDEYSSAGIFVKNGPAISTISKDIFGEWNVIRDKWNAEYDDIHLKKKAVVTEKYEDDRRKSFKKIGSFSLEQLQEYADADLSVVEKLKEIIIQKVDEIYKVYGSSEKLFDADFVLEKSLKKNDAVVAIMKDLLDSVKSFENYIKAFFGEGKETNRDESFYGDFVLAYDILLKVDHIYDAIRNYVTQKPYSKDKFKLYFQNPQFMRGWDKDVETDRRATILRYGSKYYLAIMDKKYAKCLQKIDKDDVNGNYEKINYKLLPGPNKMLPKVFFSKKWMAYYNPSEDIQKIYKNGTFKKGDMFNLNDCHKLIDFFKDSISRYPKWSNAYDFNFSETEKYKDIAGFYREVEEQGYKVSFESASKKEVDKLVEEGKLYMFQIYNKDFSDKSHGTPNLHTMYFKLLFDENNHGQIRLSGGAELFMRRASLKKEELVVHPANSPIANKNPDNPKKTTTLSYDVYKDKRFSEDQYELHIPIAINKCPKNIFKINTEVRVLLKHDDNPYVIGIDRGERNLLYIVVVDGKGNIVEQYSLNEIINNFNGIRIKTDYHSLLDKKEKERFEARQNWTSIENIKELKAGYISQVVHKICELVEKYDAVIALEDLNSGFKNSRVKVEKQVYQKFEKMLIDKLNYMVDKKSNPCATGGALKGYQITNKFESFKSMSTQNGFIFYIPAWLTSKIDPSTGFVNLLKTKYTSIADSKKFISSFDRIMYVPEEDLFEFALDYKNFSRTDADYIKKWKLYSYGNRIRIFRNPKKNNVFDWEEVCLTSAYKELFNKYGINYQQGDIRALLCEQSDKAFYSSFMALMSLMLQMRNSITGRTDVDFLISPVKNSDGIFYDSRNYEAQENAILPKNADANGAYNIARKVLWAIGQFKKAEDEKLDKVKIAISNKEWLEYAQTSVKH

SEQ ID NO: 861 - protein, 1374 aa, Synthetic construct
MSKLEKFTNCYSLSKTLRFKAIPVGKTQENIDNKRLLVEDEKRAEDYKGVKKLLDRYYLSFINDVLHSIKLKNLNNYISLFRKKTRTEKENKELENLEINLRKEIAKAFKGNEGYKSLFKKDIIETILPEFLDDKDEIALVNSFNGFTTAFTGFFRNRENMFSEEAKSTSIAFRCINENLTRYISNMDIFEKVDAIFDKHEVQEIKEKILNSDYDVEDFFEGEFFNFVLTQEGIDVYNAIIGGFVTESGEKIKGLNEYINLYNQKTKQKLPKFKPLYKQVLSDRESLSFYGSGENQTTQKGQKNSRERMKRIEEGIKELGSQILKEHPVENTQLQNEKLYLYYLQNGRDMYVDQELDINRLSDYDVDHIVPQSFLKDDSIDNKVLTRSDKNRGKSDNVPSEEVVKKMKNYWRQLLNAKLITQRKFDNLTKAERGGLSEGYTSDEEVLEVFRNTLNKNSEIFSSIKKLEKLFKNFDEYSSAGIFVKNGPAISTISKDIFGEWNVIRDKWNAEYDDIHLKKKAVVTEKYEDDRRKSFKKIGSFSLEQLQEYADADLSVVEKLKEIIIQKVDEIYKVYGSSEKLFDADFVLEKSLKKNDAVVAIMKDLLDSVKSFENYIKAFFGEGKETNRDESFYGDFVLAYDILLKVDHIYDAIRNYVTQKPYSKDKFKLYFQNPQFMGGWDKDKETDYRATILRYGSKYYLAIMDKKYAKCLQKIDKDDVNGNYEKINYKLLPGPNKMLPKVFFSKKWMAYYNPSEDIQKIYKNGTFKKGDMFNLNDCHKLIDFFKDSISRYPKWSNAYDFNFSETEKYKDIAGFYREVEEQGYKVSFESASKKEVDKLVEEGKLYMFQIYNKDFSDKSHGTPNLHTMYFKLLFDENNHGQIRLSGGAELFMRRASLKKEELVVHPANSPIANKNPDNPKKTTTLSYDVYKDKRFSEDQYELHIPIAINKCPKNIFKINTEVRVLLKHDDNPYVIGIDRGERNLLYIVVVDGKGNIVEQYSLNEIINNFNGIRIKTDYHSLLDKKEKERFEARQNWTSIENIKELKAGYISQVVHKICELVEKYDAVIALEDLNSGFKNSRVKVEKQVYQKFEKMLIDKLNYMVDKKSNPCATGGALKGYQITNKFESFKSMSTQNGFIFYIPAWLTSKIDPSTGFVNLLKTKYTSIADSKKFISSFDRIMYVPEEDLFEFALDYKNFSRTDADYIKKWKLYSYGNRIRIFRNPKKNNVFDWEEVCLTSAYKELFNKYGINYQQGDIRALLCEQSDKAFYSSFMALMSLMLQMRNSITGRTDVDFLISPVKNSDGIFYDSRNYEAQENAILPKNADANGAYNIARKVLWAIGQFKKAEDEKLDKVKIAISNKEWLEYAQTSVKH

SEQ ID NO: 862 - skipped

SEQ ID NO: 863 - DNA, 7000 bp, Homo sapiens
  source 1..7000: mol_type = genomic DNA
aggaggtacctgggggtgggggctggtcagggctgagggtccaggcccccaccccgaccaggtcctgcccggccctcccttgcctcacctggcgatatctaggtagccacaggaggcggccacgtgcagtggcgtccagccctcgttgtctgcctggttcacagtggcgccctgctccaccaagaagcgcaccacctccaggttctcatcaatgcaggcctgggggtgggaaacagccgtcagccgcacctaccccagccacggtgtcccagcaagtcgggactccagagggagccacgaaaacagatccagggacacggtgctaggacagtggggaaaatgacccaacagcctctggccactggctgtttaagatacgcctggttgcccagtggtcaggccggccaggccttcagtgctcagtggaaaccacgaaaggactcctggctatctgcaaacaggaagtgaacggggaagggagggggcttctcatctgggtgcgggaaccccacatggtacctgttagacacggcaaaacccccgtcaccacccacaggtggcgcttccagtgctcagactagggaagaggttccagcccctcctccttcagagccaggagtcctggcccccagcccctcctgccttaaacccagccaggtccttccaagggtcaagctcggaaaccaccccagcagatactctgcaggaacgaagccgtgggcccagggctatgcagggtggaggaaggccaccctgtgctgggacagactcaggggcctgggcgggactcccagaggggtgagacagctgcacacctgtgtgcctgggccccaggctgtcacactccagttcactgaggccccctctgcacggggccctgcagccaggggctgacacgggccaccgtttctcattcttcccttaggggtccaaaacttggggggacaaaagccgaagtccagggggtcggaggagggacttgccccaggccttgtggacactgggtgggctccgggacctgaactggagctgaggaaggagtgaagctaaactcctagatccacgggataaattaccccccaagtccctcacctctccaaagctgcccatctggaggaggcgggagggagctacgagggccaagagcatgaggtcatggaaactcgggctgtgaaggggccgcacgtgccctgggaacgggatgaactcggctcgtttatttccacccagttgtcatggcgataggggaggggggcaaggagagcaatgggcctttccctttcaaggacctgcccagtacaggcatccctgtgaaagatgcctgaggcctgggcaccagggactccagagtccaggcccaacccctccccattcaacccaggaggccaggccccagcccttccgccctcagatgaaggagtccaggcccccagcctctccccattcagacccaggggtccaggcccagccccgcctccctaagacccagaagtccaggcccccagcccctcctccctcagacccacgagtccaggccccagcccctcctccctcggacccaggagtccaggcccccagtccctccaccctcagacccaggagtccaggccccagcccctcctccctcggacccaggagtccaggccccagcccctcctctctcaaacccaggagcccaggcccccagctcttctctgttcagccctaagaatcctggctccagcccctcctactctagcccccaaccccccagccactaaggcaattggggtgcaggaatgggggcagggtaccagcctcaccaagtggttgataaacccacgtggggtaccctaagaacttgggaacagccacagcaggggggcgatgcttggggacctgcctggagaaggatgcaggacgagaaacacagccccaggtggagaaactggccgggaatcaagagtcacccagagacagtgaccaaccatccctgttttcctaggactgagggtttcagcgctaaaactaggctgtcctgggcaaacagcataagctggtcaccccacacccagacctgacccaaacccagctcccctgcttcttggccacgtaacctgagaagggaatccctcctctctgaaccccagcccaccccaatgctccaggcctcctgggataccccgaagagtgagtttgccaagcagtcaccccacagttggaggagaatccacccaaaaggcagcctggtagacagggctggggtggcctctcgtggggtccaggccaagtaggtggcctggggcctctgggggatgcaggggaagggggatgcaggggaacggggatgcaggggaacggggctcagtctgaagagcagagccaggaacccctgtagggaaggggcaggagagccaggggcatgagatggtggacgaggaagggggacagggaagcctgagcgcctctcctgggcttgccaaggactcaaacccagaagcccagagcagggccttagggaagcgggaccctgctctgggcggaggaatatgtcccagatagcactggggactctttaaggaaagaaggatggagaaagagaaagggagtagaggcggccacgacctggtgaacacctaggacgcaccattctcacaaagggagttttccacacggacacccccctcctcaccacagccctgccaggacggggctggctactggccttatctcacaggtaaaactgacgcacggaggaacaatataaattggggactagaaaggtgaagagccaaagttagaactcaggaccaacttattctgattttgtttttccaaactgcttctcctcttgggaagtgtaaggaagctgcagcaccaggatcagtgaaacgcaccagacagccgcgtcagagcagctcaggttctgggagagggtagcgcagggtggccactgagaaccgggcaggtcacgcatcccccccttccctcccaccccctgccaagctctccctcccaggatcctctctggctccatcgtaagcaaaccttagaggttctggcaaggagagagatggctccaggaaatgggggtgtgtcaccagataaggaatctgcctaacaggaggtgggggttagacccaatatcaggagactaggaaggaggaggcctaaggatggggcttttctgtcaccaatcctgtccctagtggccccactgtggggtggaggggacagataaaagtacccagaaccagagccacattaaccggccctgggaatataaggtggtcccagctcggggacacaggatccctggaggcagcaaacatgctgtcctgaagtggacataggggcccgggttggaggaagaagactagctgagctctcggacccctggaagatgccatgacagggggctggaagagctagcacagactagagaggtaaggggggtaggggagctgcccaaatgaaaggagtgagaggtgacccgaatccacaggagaacggggtgtccaggcaaagaaagcaagaggatggagaggtggctaaagccagggagacggggtactttggggttgtccagaaaaacggtgatgatgcaggcctacaagaaggggaggcgggacgcaagggagacatccgtcggagaaggccatcctaagaaacgagagatggcacaggccccagaaggagaaggaaaagggaacccagcgagtgaagacggcatggggttgggtgagggaggagagatgcccggagaggacccagacacggggaggatccgctcagaggacatcacgtggtgcagcgccgagaaggaagtgctccggaaagagcatccttgggcagcaacacagcagagagcaaggggaagagggagtggaggaagacggaacctgaaggaggcggcagggaaggatctgggccagccgtagaggtgacccaggccacaagctgcagacagaaagcggcacaggcccaggggagagaatgcaggtcagagaaagcaggacctgcctgggaaggggaaacagtgggccagaggcggcgcagaagccagtagagctcaaagtggtccggactcaggagagagacggcagcgttagagggcagagttccggcggcacagcaagggcactcgggggcgagaggagggcagcgcaaagtgacaatggccagggccaggcagatagaccagactgagctatgggagctggctcaggttcaggagagggcagggcagggaaggagacaaagtccaggaccggctggaggggctcaacatcggaagaggggaagtcgagggagggatggtaaggaggactgcatgggtcagcacaggctgccaaagccagggccagttaaagcgactccaatgcggaagagagtaggtcgaaggggaatggtaaggaggcctggggcagagtggtcagcacagagtggctaagcccagggccagttgaagcggctccaattcggaagtggggtggtcgaaggggaatggtaagggggactgggacggggtgtcagcatagggtggcaaagcccagggccaggaacgacggggcggatcgagactggcaacggggaaggaggatgccccaggtggcgcagcagagggtggacctggccccgggagacgccgggcggggggcgctgacctggtgcagggcgctgataccgtcggcgttggtggagtccagcacggcgcgggcgggcggcggcgcggcggggtcgagctcggcgccggggccagggtcggcggcgcgcagcatcagacgcgcctcgtccaggtcgccgcccgcacaggccgccaggaactcggcggcgcgctcgaagcggacggtgcgggcgcggcgctctccggggccaggctcggcgcccgcccgcgccccccactgccgcagctgctcccgtcgccgctcccgggcagccgccgccgccgcccccgggccagccgccgggccatcctctccggacatcgcaccgcccgcccgcccagcgagcgagcgagcgccgagccccaaccgccgccaccacccgcccgcccgcccgccccgggggccgccgggaactgccgctggccccccaccgccccaaggatctcccggtccccgcccggcgtgctgacgtcacggcgctgccccagggtgtgctgggcaggtcgcggggagcgctgggaaatggagtccattagcagaagtggcccttggccacttccaggagtcgctgtgccccgatgcacactgggaagtccgcagctccgaggcgcccagtggaaatcgccagatgagggcctcctccggggaatgctgggaaatggagtctacaggccggaggggtgccccacggcatactaggaagtgtgtagcaccgggtaaaggggatgaatagcagactgccccggggcagttaggaattcgactggacagccgcgtgggagggagtgcggggagaggcagagttgttttgttattgttgttttattttgttttctttgttttgagacggagtctcgctctgtcgccacgctggagttcagtggcgcgatatcggctcgctgcaacctccgcttcccaggttcaagcaattctggctcagtccccagagtagctgggataacaggcgcgcgccaccccgccctgctaatttttatatttttagtagagacgggatttcaccatgttggccatgatggtcttgatctcttgacctcatgatccgcccgcctcggcctgtaatcctgctgggatgacgagcgtaagccaccatgcccagctgggttttatttattttggtttttttcctgaccccttaactagaaataagctccacgagagcgggatcttttgtcttctgtgcactacttgtcctcggttcttagaacagaacctgagagaacctgatcgcaaatatttttggaatgaatgaatgaatgggttcaccagggcaccatgggaaactgagtccgcaacctagaagccatgaaagacagtccacttccaagcttccctgggtgacctcgcagggcatgctgggaaatgaaatttgcggtgaaaaggtcaggaccacgatcctagggcacgctgggaaatgtagcccacagggccacacccctaaaagcacagtggggtgcaaggcagggccccaaggcatttagggctcggggcaagagaaatccacactccactccctaatggtaatccctgagccacaccgagtaaaggaacccaagacacagtgtccacagggacagggctctcagagctttcactggcccgcgcttctcctgcgcccacccggacctcctgggaaccgcccaggccctcgcgcgctctcaaggcatgctgggattggtggtcccgggcaaggagttccagcaggtggggggcgaatcacctttcagcgggcccaagcgatgagcacaccttgatcttcaccttacggatcccgcgcccaactcaagattgggaaggtggctggcactttgtgacaggaagagtcccataaaaatcatacagaaaagggccaaaatcgggacagagactacagactgtttcccaagcgctgtgggagtttcccacccactctgaagtccttgggtttgcgcggagacgtaaactgcgcatcccacgaggcctgtttctttccctctctctttctcttttgttgttgttgttgctgctgctgttacgaaaatttttgtggttttattgtatcatgaggcattgaaacatccggcgactcaatgtctaggcggtgaggcagccgctttctccttcactttctttgggttaagtagagcaacttgtcagtagttttgtttttttttgttgttgttgttgtttttgagacggaggcttgctctgtcgcccaggctggagtgcagtggcgcgatgtcggctcactgcaagctctgcctcccgggttcaagcgattctcctgcctcagcctcctgagtagctgggactacaggcgtgctccaccacgcccggctaatttttgttttttagta

SEQ ID NO: 864 - DNA, 5000 bp, Homo sapiens
  source 1..5000: mol_type = genomic DNA
acagttaaatttgtaatttgggttgtgtgaaaacttctttgggcctcataaacaaccacagaaccacaagttgggtagcctggcagtgtcagaagtctgaacccagcatagtggtcagcaggcaggacgaatcacactgaatgcaaaccacagggtttcgcagcgtggtgagcatcaccaacccacagccaaggcggcgctggctttttttttttttttaatctttaacaatttgaatatttgtttttacaaaggtgcattttttaatagggcttggggagtcccagaggtatccagcagaggggagaagaaagagagatgtagggctagaggggtgaggctgaaacagtgacctgtcttggttttcgctccgaaggtaaaagaaatcattgagtcccccgccttcagaagagggtgcattttcaggaggaagcgatggcttcagacagcatatttgagtcatttccttcgtacccacagtgcttcatgagaggtgagtacatgctggtcttgtaatatctacttttgctcagctttgcctgtaatgaaatggcagcttgtttcacctcggtgcagagatgcctcggtgcctgccagttccctgtcttgtttgtgagaggaattcaaactgaggcatatgattacaagtctattggattacttactaatcagatggaagctcttcagaaatgttttaataaatacttagttatgctgttggagtgttcagtcggtgcgtgagaactttgtcaagtgcgagtaagttgtgctggtcttgtttaaaggcttagagattatgaagcttgcacgaagctccctgggttttattttgctgtcccttgcccggaatgcctgtgtctgagttatccttaactcggcatgctgtgtggcccagaatgcagcctgccctggggcttagcaggcacatgcacagagccagccaggagggctggtgccagtgtggggcaggaggcggaggctctcagatagccttgcaccagcctggggacttcagggccaaagtggcaaggcagctgtctctataaggcagagagtacaggagactgacagacttggttaggttaaaatcatcagcatggggctgtgctgtgtttttccttgtagcctcaatgcaaagagacaaccagcatctttcaagagagaaaggaagcaaattgtggcataccgaggtctctctggaaaagggcaatagagaagtttcccgagttaagcattctcgcagcttaagtcgttagattacaggcttatgaataggaacagccagggtggaaaacctgtctccatttttgaaaccagcctcttgaaatggacaaagctgtggttgagctgtgagtgtgtgagtatgtgtgtgcatgtgcgtcttgtgtatctttcgtggtaaaagagggctgtgcttaaacaaacaaaaataataacataaaatgtctcaaaggcattgccgtgtgcgtcggggcacgcactctgaccagtgcctgcaaagtgtatcttgatggtttggcaaagctgagatggagtgggctgggatgggagaataattaattttctggctacaaactctcttgagcacccaaattgtatctgtgactcattatttattcatacagctaagtgagcaggggaatgcagagggcttgccggccactttatcacagcaaatgctattgtgaatgcacggggctgtatgtttccgggtccctgaaattaaaaaacttgatgagagagagagagagagagagagagagagagagagagtgtgtgtgtgtgtgtgtgtgtgtgtgtgtgtgtgtgtgtgtgtgtgttggagatggcaagagagaagttaaagagaaagagaagaaaacaagtcattaaccaagctcaagtttcaaattaaagagttttcaagtgcttctttactggcagcagagggaattttagtgaagttgaatcatgcagacgtgcgttagtcactagtcttgcagcgtcgtttggttggtaacacagagacaccggccactggtgaaaagctgcaaacggctccctggctgcatttcctctgggctgctaacaagcagaggaagcaatatttgtatagaataacagaaaaaaaagatcttcctggctttactctgctttcagtaccccctcagaacgtgtattgtttcctattttatcaactcaggaaggcagattcaggaaatttttaagcattccattgagcaataggttgggtttcagtgtgcagtgctggcccctggggctctccttactggccaacggcaaagatggtgagggacacgctgagctatgcagacatcaggaaatagcaggagtctggctatctcccggacaagcccagggctcctgtgcccgatggacactcagctgacctgcgctaggttaggaacaagggtcggttagctttcacggaggcagtgtagggagggcctgagctcgcaccaagactcaaaagggatcatctggaaaggtttttccactccttcctttcagtgaaaggaactcagggttctttagaatctctaatttggtaatataatattgagatttgatgtcagagggccaagtgaaatcttggcaatttcctggttaatttcatccaagtgatccatcaacataaaggtttaaattgtccaggttaactgtccacatcattcacccaagccggagaggtagcaaaatatcatttcttttgataccgtttggtcatcatcttagagcttgatgctagaagaatcaccatccctgccaacaaatggctctcccccagagttctcagcctgttgccatagctgggccactcgcagtggtcaatgcggtcacttctggctgcctataatttacagcgtgtgttccctccccaacggcaactgtgagccgaaagggaagacagcatctttgttttcttcctgggatggtactttatcagtccatgcaattctcacagaaggaaacctgtaactcatttttagccagatacccatgtggaaattggggggaaagagaggagtgaagccaagcaaaccattgttcccttccttgagagaggcaagccggagtctgagagactggcacatgaaattgatgtggtctaccacagagaactcggggctttttctatcacaccacaccaggttcccaccgaatttgcttaggaaggaagacaagatgcgattgaaattccctggaattatcacacacggtgtgcaacgtacaattcttgccgaacccaaacttgggttcccttgaaaagtgcagtgtgtcggcagaaagagttgaggtaggtgtggggaggaaaagcctcggcacgtacatatttttgcaaaatggctcaggtagccttgttcttagaagtggcttagtggtctatgcaaagcctgaacactcacatgcctctgcgttcctagaaccacaggtaaaaatctcagcgagaccgactccctgcttgtcttctcagcggttcaagtttaccccactgaagcagtctttcaaagggaattgccaagtacaaagctgcatgtataaagtatgttcttctctaagcatcggcttgccgctcttttcagaagaatatttattaagacacttcttctggcttgactgaacacttaagatcttaagacttcaggcttaagccacagaaatttattttcacacagttctggagggagactggaggtgtgagatcaaggtgtcggcaaggctgatttctggtgaggcctctctccttggttttgcagacagctcccttctccctgtttcatcacatggttatccctctgtgtgtgtctgtatcctaatctcttcttataaggataccaattgcattgtattggggctagcctaatgacgtcattttaaaaccctatgtccaaatagtgtcaaattatgagcaccttggggttaggacttcaatgtattaattctagggagacatactgcagtccctaacagtgggtcttagcaaatctgacccaccctggcccacaaggaaactgtgggatggggcatcctggctgctctcttggatgttaaagaatcagactgtagttcctcctttgtgagatggagtttcacatctgaaactgcccacacattttgaaactataaaaaaaaaaggtgtgataaaactatctaaactcacaatcatgcctttgccatttagactttttgcacgctaagaaactgtagaaaatgacgagtaattttgaaatgtttaagtgttaaaagagcaaatggcagccgccccaaagaaacctcctcttggctctgctttcttggggaggattgtctttgtacttcagactgactttattagtggggtttagggggctgtaggaggccccacagctgctcacacaccgagtacaggggcatggagcaaccagtagcagaagcacctttggaaacagcaactgacccgattctgaatggcaagaagcctttctgagcttttgaaagcaaatgagtagctgagacgttcctacattctctcaaaatagatccgaaagatgtgctcagaaaatatgtagccctttactgagaaatcaagcctggtgagatgctgggacagaggacggctgcacagccgctgtgcacacacagactttaataaggagcccaaggcctagagagaagagtctggaggcataagagcacctgctattagagaaagcaatggcaggaggtctgtgcagggaatgtgctcagatgacacagtgatggccttttctttcttttcttttttctggctttcatcaaatagcatatagaacttctctcttgagccttagtttcctcatctgcagagtaaggattgcaatagtacctgttattaaggtagctgtgtggaccgaattaatctgtgtaaggtgctttgcccagccatataaagtaagcaataaatctgaatggtggctatcaatgttcagttatctaagaaggcagccagtcaaccgctgtctgctctagggagggagagg

SEQ ID NO: 865 - DNA, 23 bp, synthetic construct
  source 1..23: mol_type = other DNA
cacgtctcatatgccccttggca

SEQ ID NO: 866 - DNA, 23 bp, synthetic construct
  source 1..23: mol_type = other DNA
gaacatgaaaacttaaatagaac

SEQ ID NO: 867 - DNA, 2898 bp, synthetic construct
  source 1..2898: mol_type = other DNA
gctagcgagggcctatttcccatgattccttcatatttgcatatacgatacaaggctgttagagagataattggaattaatttgactgtaaacacaaagatattagtacaaaatacgtgacgtagaaagtaataatttcttgggtagtttgcagttttaaaattatgttttaaaatggactatcatatgcttaccgtaacttgaaagtatttcgatttcttggctttatatatcttgtggaaaggacgaaacaccgaatttctactaagtgtagatcacgtctcatatgccccttggcatttttttgaattctgatgcggtattttctccttacgcatctgtgcggtatttcacaccgcatacgtcaaagcaaccatagtacgcgccctgtagcggcgcattaagcgcggcgggtgtggtggttacgcgcagcgtgaccgctacacttgccagcgccttagcgcccgctcctttcgctttcttcccttcctttctcgccacgttcgccggctttccccgtcaagctctaaatcgggggctccctttagggttccgatttagtgctttacggcacctcgaccccaaaaaacttgatttgggtgatggttcacgtagtgggccatcgccctgatagacggtttttcgccctttgacgttggagtccacgttctttaatagtggactcttgttccaaactggaacaacactcaactctatctcgggctattcttttgatttataagggattttgccgatttcggtctattggttaaaaaatgagctgatttaacaaaaatttaacgcgaattttaacaaaatattaacgtttacaattttatggtgcactctcagtacaatctgctctgatgccgcatagttaagccagccccgacacccgccaacacccgctgacgcgccctgacgggcttgtctgctcccggcatccgcttacagacaagctgtgaccgtctccgggagctgcatgtgtcagaggttttcaccgtcatcaccgaaacgcgcgagacgaaagggcctcgtgatacgcctatttttataggttaatgtcatgataataatggtttcttagacgtcaggtggcacttttcggggaaatgtgcgcggaacccctatttgtttatttttctaaatacattcaaatatgtatccgctcatgagacaataaccctgataaatgcttcaataatattgaaaaaggaagagtatgagtattcaacatttccgtgtcgcccttattcccttttttgcggcattttgccttcctgtttttgctcacccagaaacgctggtgaaagtaaaagatgctgaagatcagttgggtgcacgagtgggttacatcgaactggatctcaacagcggtaagatccttgagagttttcgccccgaagaacgttttccaatgatgagcacttttaaagttctgctatgtggcgcggtattatcccgtattgacgccgggcaagagcaactcggtcgccgcatacactattctcagaatgacttggttgagtactcaccagtcacagaaaagcatcttacggatggcatgacagtaagagaattatgcagtgctgccataaccatgagtgataacactgcggccaacttacttctgacaacgatcggaggaccgaaggagctaaccgcttttttgcacaacatgggggatcatgtaactcgccttgatcgttgggaaccggagctgaatgaagccataccaaacgacgagcgtgacaccacgatgcctgtagcaatggcaacaacgttgcgcaaactattaactggcgaactacttactctagcttcccggcaacaattaatagactggatggaggcggataaagttgcaggaccacttctgcgctcggcccttccggctggctggtttattgctgataaatctggagccggtgagcgtggaagccgcggtatcattgcagcactggggccagatggtaagccctcccgtatcgtagttatctacacgacggggagtcaggcaactatggatgaacgaaatagacagatcgctgagataggtgcctcactgattaagcattggtaactgtcagaccaagtttactcatatatactttagattgatttaaaacttcatttttaatttaaaaggatctaggtgaagatcctttttgataatctcatgaccaaaatcccttaacgtgagttttcgttccactgagcgtcagaccccgtagaaaagatcaaaggatcttcttgagatcctttttttctgcgcgtaatctgctgcttgcaaacaaaaaaaccaccgctaccagcggtggtttgtttgccggatcaagagctaccaactctttttccgaaggtaactggcttcagcagagcgcagataccaaatactgttcttctagtgtagccgtagttaggccaccacttcaagaactctgtagcaccgcctacatacctcgctctgctaatcctgttaccagtggctgctgccagtggcgataagtcgtgtcttaccgggttggactcaagacgatagttaccggataaggcgcagcggtcgggctgaacggggggttcgtgcacacagcccagcttggagcgaacgacctacaccgaactgagatacctacagcgtgagctatgagaaagcgccacgcttcccgaagggagaaaggcggacaggtatccggtaagcggcagggtcggaacaggagagcgcacgagggagcttccagggggaaacgcctggtatctttatagtcctgtcgggtttcgccacctctgacttgagcgtcgatttttgtgatgctcgtcaggggggcggagcctatggaaaaacgccagcaacgcggcctttttacggttcctggccttttgctggccttttgctca

SEQ ID NO: 868 - DNA, 2898 bp, synthetic construct
  source 1..2898: mol_type = other DNA
gctagcgagggcctatttcccatgattccttcatatttgcatatacgatacaaggctgttagagagataattggaattaatttgactgtaaacacaaagatattagtacaaaatacgtgacgtagaaagtaataatttcttgggtagtttgcagttttaaaattatgttttaaaatggactatcatatgcttaccgtaacttgaaagtatttcgatttcttggctttatatatcttgtggaaaggacgaaacaccgaatttctactaagtgtagatgaacatgaaaacttaaatagaactttttttgaattctgatgcggtattttctccttacgcatctgtgcggtatttcacaccgcatacgtcaaagcaaccatagtacgcgccctgtagcggcgcattaagcgcggcgggtgtggtggttacgcgcagcgtgaccgctacacttgccagcgccttagcgcccgctcctttcgctttcttcccttcctttctcgccacgttcgccggctttccccgtcaagctctaaatcgggggctccctttagggttccgatttagtgctttacggcacctcgaccccaaaaaacttgatttgggtgatggttcacgtagtgggccatcgccctgatagacggtttttcgccctttgacgttggagtccacgttctttaatagtggactcttgttccaaactggaacaacactcaactctatctcgggctattcttttgatttataagggattttgccgatttcggtctattggttaaaaaatgagctgatttaacaaaaatttaacgcgaattttaacaaaatattaacgtttacaattttatggtgcactctcagtacaatctgctctgatgccgcatagttaagccagccccgacacccgccaacacccgctgacgcgccctgacgggcttgtctgctcccggcatccgcttacagacaagctgtgaccgtctccgggagctgcatgtgtcagaggttttcaccgtcatcaccgaaacgcgcgagacgaaagggcctcgtgatacgcctatttttataggttaatgtcatgataataatggtttcttagacgtcaggtggcacttttcggggaaatgtgcgcggaacccctatttgtttatttttctaaatacattcaaatatgtatccgctcatgagacaataaccctgataaatgcttcaataatattgaaaaaggaagagtatgagtattcaacatttccgtgtcgcccttattcccttttttgcggcattttgccttcctgtttttgctcacccagaaacgctggtgaaagtaaaagatgctgaagatcagttgggtgcacgagtgggttacatcgaactggatctcaacagcggtaagatccttgagagttttcgccccgaagaacgttttccaatgatgagcacttttaaagttctgctatgtggcgcggtattatcccgtattgacgccgggcaagagcaactcggtcgccgcatacactattctcagaatgacttggttgagtactcaccagtcacagaaaagcatcttacggatggcatgacagtaagagaattatgcagtgctgccataaccatgagtgataacactgcggccaacttacttctgacaacgatcggaggaccgaaggagctaaccgcttttttgcacaacatgggggatcatgtaactcgccttgatcgttgggaaccggagctgaatgaagccataccaaacgacgagcgtgacaccacgatgcctgtagcaatggcaacaacgttgcgcaaactattaactggcgaactacttactctagcttcccggcaacaattaatagactggatggaggcggataaagttgcaggaccacttctgcgctcggcccttccggctggctggtttattgctgataaatctggagccggtgagcgtggaagccgcggtatcattgcagcactggggccagatggtaagccctcccgtatcgtagttatctacacgacggggagtcaggcaactatggatgaacgaaatagacagatcgctgagataggtgcctcactgattaagcattggtaactgtcagaccaagtttactcatatatactttagattgatttaaaacttcatttttaatttaaaaggatctaggtgaagatcctttttgataatctcatgaccaaaatcccttaacgtgagttttcgttccactgagcgtcagaccccgtagaaaagatcaaaggatcttcttgagatcctttttttctgcgcgtaatctgctgcttgcaaacaaaaaaaccaccgctaccagcggtggtttgtttgccggatcaagagctaccaactctttttccgaaggtaactggcttcagcagagcgcagataccaaatactgttcttctagtgtagccgtagttaggccaccacttcaagaactctgtagcaccgcctacatacctcgctctgctaatcctgttaccagtggctgctgccagtggcgataagtcgtgtcttaccgggttggactcaagacgatagttaccggataaggcgcagcggtcgggctgaacggggggttcgtgcacacagcccagcttggagcgaacgacctacaccgaactgagatacctacagcgtgagctatgagaaagcgccacgcttcccgaagggagaaaggcggacaggtatccggtaagcggcagggtcggaacaggagagcgcacgagggagcttccagggggaaacgcctggtatctttatagtcctgtcgggtttcgccacctctgacttgagcgtcgatttttgtgatgctcgtcaggggggcggagcctatggaaaaacgccagcaacgcggcctttttacggttcctggccttttgctggccttttgctca

SEQ ID NO: 869 - protein, 60 aa, synthetic construct
  VARIANT 4..60: note = Residue may be present or absent
SGSSGSSGSSGSSGSSGSSGSSGSSGSSGSSGSSGSSGSSGSSGSSGSSGSSGSSGSSGS

SEQ ID NO: 870 - protein, 80 aa, synthetic construct
  VARIANT 5..80: note = Residue may be present or absent
SGGSSGGSSGGSSGGSSGGSSGGSSGGSSGGSSGGSSGGSSGGSSGGSSGGSSGGSSGGSSGGSSGGSSGGSSGGSSGGS

SEQ ID NO: 871 - DNA, 4627 bp, Homo sapiens
  source 1..4627: mol_type = genomic DNA
atatccagaaccctgaccctgccgtgtaccagctgagagactctaaatccagtgacaagtctgtctgcctattcaccgattttgattctcaaacaaatgtgtcacaaagtaaggattctgatgtgtatatcacagacaaaactgtgctagacatgaggtctatggacttcaagagcaacagtgctgtggcctggagcaacaaatctgactttgcatgtgcaaacgccttcaacaacagcattattccagaagacaccttcttccccagcccaggtaagggcagctttggtgccttcgcaggctgtttccttgcttcaggaatggccaggttctgcccagagctctggtcaatgatgtctaaaactcctctgattggtggtctcggccttatccattgccaccaaaaccctctttttactaagaaacagtgagccttgttctggcagtccagagaatgacacgggaaaaaagcagatgaagagaaggtggcaggagagggcacgtggcccagcctcagtctctccaactgagttcctgcctgcctgcctttgctcagactgtttgccccttactgctcttctaggcctcattctaagccccttctccaagttgcctctccttatttctccctgtctgccaaaaaatctttcccagctcactaagtcagtctcacgcagtcactcattaacccaccaatcactgattgtgccggcacatgaatgcaccaggtgttgaagtggaggaattaaaaagtcagatgaggggtgtgcccagaggaagcaccattctagttgggggagcccatctgtcagctgggaaaagtccaaataacttcagattggaatgtgttttaactcagggttgagaaaacagctaccttcaggacaaaagtcagggaagggctctctgaagaaatgctacttgaagataccagccctaccaagggcagggagaggaccctatagaggcctgggacaggagctcaatgagaaaggagaagagcagcaggcatgagttgaatgaaggaggcagggccgggtcacagggccttctaggccatgagagggtagacagtattctaaggacgccagaaagctgttgatcggcttcaagcaggggagggacacctaatttgcttttcttttttttttttttttttttttttttttttgagatggagttttgctcttgttgcccaggctggagtgcaatggtgcatcttggctcactgcaacctccgcctcccaggttcaagtgattctcctgcctcagcctcccgagtagctgagattacaggcacccgccaccatgcctggctaattttttgtatttttagtagagacagggtttcactatgttggccaggctggtctcgaactcctgacctcaggtgatccacccgcttcagcctcccaaagtgctgggattacaggcgtgagccaccacacccggcctgcttttcttaaagatcaatctgagtgctgtacggagagtgggttgtaagccaagagtagaagcagaaagggagcagttgcagcagagagatgatggaggcctgggcagggtggtggcagggaggtaaccaacaccattcaggtttcaaaggtagaaccatgcagggatgagaaagcaaagaggggatcaaggaaggcagctggattttggcctgagcagctgagtcaatgatagtgccgtttactaagaagaaaccaaggaaaaaatttggggtgcagggatcaaaactttttggaacatatgaaagtacgtgtttatactctttatggcccttgtcactatgtatgcctcgctgcctccattggactctagaatgaagccaggcaagagcagggtctatgtgtgatggcacatgtggccagggtcatgcaacatgtactttgtacaaacagtgtatattgagtaaatagaaatggtgtccaggagccgaggtatcggtcctgccagggccaggggctctccctagcaggtgctcatatgctgtaagttccctccagatctctccacaaggaggcatggaaaggctgtagttgttcacctgcccaagaactaggaggtctggggtgggagagtcagcctgctctggatgctgaaagaatgtctgtttttccttttagaaagttcctgtgatgtcaagctggtcgagaaaagctttgaaacaggtaagacaggggtctagcctgggtttgcacaggattgcggaagtgatgaacccgcaataaccctgcctggatgagggagtgggaagaaattagtagatgtgggaatgaatgatgaggaatggaaacagcggttcaagacctgcccagagctgggtggggtctctcctgaatccctctcaccatctctgactttccattctaagcactttgaggatgagtttctagcttcaatagaccaaggactctctcctaggcctctgtattcctttcaacagctccactgtcaagagagccagagagagcttctgggtggcccagctgtgaaatttctgagtcccttagggatagccctaaacgaaccagatcatcctgaggacagccaagaggttttgccttctttcaagacaagcaacagtactcacataggctgtgggcaatggtcctgtctctcaagaatcccctgccactcctcacacccaccctgggcccatattcatttccatttgagttgttcttattgagtcatccttcctgtggtagcggaactcactaaggggcccatctggacccgaggtattgtgatgataaattctgagcacctaccccatccccagaagggctcagaaataaaataagagccaagtctagtcggtgtttcctgtcttgaaacacaatactgttggccctggaagaatgcacagaatctgtttgtaaggggatatgcacagaagctgcaagggacaggaggtgcaggagctgcaggcctcccccacccagcctgctctgccttggggaaaaccgtgggtgtgtcctgcaggccatgcaggcctgggacatgcaagcccataaccgctgtggcctcttggttttacagatacgaacctaaactttcaaaacctgtcagtgattgggttccgaatcctcctcctgaaagtggccgggtttaatctgctcatgacgctgcggctgtggtccagctgaggtgaggggccttgaagctgggagtggggtttagggacgcgggtctctgggtgcatcctaagctctgagagcaaacctccctgcagggtcttgcttttaagtccaaagcctgagcccaccaaactctcctacttcttcctgttacaaattcctcttgtgcaataataatggcctgaaacgctgtaaaatatcctcatttcagccgcctcagttgcacttctcccctatgaggtaggaagaacagttgtttagaaacgaagaaactgaggccccacagctaatgagtggaggaagagagacacttgtgtacaccacatgccttgtgttgtacttctctcaccgtgtaacctcctcatgtcctctctccccagtacggctctcttagctcagtagaaagaagacattacactcatattacaccccaatcctggctagagtctccgcaccctcctcccccagggtccccagtcgtcttgctgacaactgcatcctgttccatcaccatcaaaaaaaaactccaggctgggtgcgggggctcacacctgtaatcccagcactttgggaggcagaggcaggaggagcacaggagctggagaccagcctgggcaacacagggagaccccgcctctacaaaaagtgaaaaaattaaccaggtgtggtgctgcacacctgtagtcccagctacttaagaggctgagatgggaggatcgcttgagccctggaatgttgaggctacaatgagctgtgattgcgtcactgcactccagcctggaagacaaagcaagatcctgtctcaaataataaaaaaaataagaactccagggtacatttgctcctagaactctaccacatagccccaaacagagccatcaccatcacatccctaacagtcctgggtcttcctcagtgtccagcctgacttctgttcttcctcattccagatctgcaagattgtaagacagcctgtgctccctcgctccttcctctgcattgcccctcttctccctctccaaacagagggaactctcctacccccaaggaggtgaaagctgctaccacctctgtgcccccccggcaatgccaccaactggatcctacccgaatttatgattaagattgctgaagagctgccaaacactgctgccaccccctctgttcccttattgctgcttgtcactgcctgacattcacggcagaggcaaggctgctgcagcctcccctggctgtgcacattccctcctgctccccagagactgcctccgccatcccacagatgatggatcttcagtgggttctcttgggctctaggtcctgcagaatgttgtgaggggtttatttttttttaatagtgttcataaagaaatacatagtattcttcttctcaagacgtggggggaaattatctcattatcgaggccctgctatgctgtgtatctgggcgtgttgtatgtcctgctgccgatgccttc

SEQ ID NO: 872 - DNA, 1704 bp, Homo sapiens
  source 1..1704: mol_type = genomic DNA
tctttaaattgccagcatggtgaagatgtaatgtgtcacctaggcccttgtctttatttcagtctgtagtggtggaagccacaaaacttatacaccatattatccactgcaatgagaatacagctagccccaaatcaaatgcttttctttcctcaaagcctcaacaatgttgccctccccccctataaattagcagtgtttagaaggagacttgtgcacattctatagattattttaaggaaaagctctgtcatccataatacatttgggcttctttctagttgaagatttataatttttttattgatgggttatgaatattgacacaggagatattcattgtttattgaaggcttgtttacataaaagatcttcacaggctaccccctaagtctagaggtcctaaaccagtgtcagggagctgtctgggtattttttcccacgtattgcactgccattctaccaacaatagaggcccattaacgtttggcccttcaagttactgcagcccaagcctcagtggcaggacgtctgcccaatatgtaaaataacggaatgaatggattccttggaaacaatgataacaagacctggctgagctaactgtgacagcatgtggtaattttccagcccgctggccctgtaaaggaaactggaacacaaagcatagactgcggggcgggccagcctgaatagctgcaaacaagtgcagaatatctgatgatgtcatacgcacagtttgacagatggggctggacaatttttccccctttaaacgtgttcttaactatttgtattccactggcttctcacttgggaagttcaatcctgtaatcacctgcttgaaagactaaacaaaccttaactgtcatgtgcttgattcaagtaccaccagttttatgaagaaaaatgatatccattattagtggctgaatgctgaggggagcagtgggggagagggtgttgctgtggattaatgcatcatctctgctttcagctgtgggccaggttttgagtctagctctgactgaatcctgccatacactttgaatagcataatgaagtattgttattgcctcagtctagtcattacatcagggaaacagacatctaaagttatcaaaactgattactagctgagcttttgtgtccataaaataaatgcattaaaaagaaggctttttttttgttgttcttatgggtgttctatcaaggttggatgttttagtgtttatagcactatgtgtcactgtgtgtaagttggtgttagggtatatctgtagtcagtactctcccaaaacatgcccatatgtggatctgcatgcgtgtgtgtttaagctggtgcatgggagacagagaaaatgaagattgacaacatttataaaaatgagacacaactcaattaaaattcaccgaaaatagtaaatgaaccagagtactcagtttaattgtaatgacacaagactgtctttttctacccttcaaataagtagctgctttggatctcacatgtcttcaccattttattcatttggttctttttatttacttttcaaggaatttatgtaaatatatgtaggctacaaaataggtctcagatacagcctgattctgtaatcttttcatcaaatagctaaccaaagagagatagccaaaggattctgtttatggagaagtgagatctgttccacagaaaagcatggc

SEQ ID NO: 873 - DNA, 23 bp, synthetic construct
  source 1..23: mol_type = other DNA
caggaggaagcgatggcttcaga

SEQ ID NO: 874 - DNA, 23 bp, synthetic construct
  source 1..23: mol_type = other DNA
aggaggaggattcggaacccaat

SEQ ID NO: 875 - DNA, 23 bp, synthetic construct
  source 1..23: mol_type = other DNA
cccaaggcagagcaggctgggtg

SEQ ID NO: 876 - DNA, 23 bp, synthetic construct
  source 1..23: mol_type = other DNA
ctgcctccagggatcctgtgtcc

SEQ ID NO: 877 - DNA, 23 bp, synthetic construct
  source 1..23: mol_type = other DNA
ctttacagggccagcgggctgga

SEQ ID NO: 878 - DNA, 2898 bp, synthetic construct
  source 1..2898: mol_type = other DNA
gctagcgagggcctatttcccatgattccttcatatttgcatatacgatacaaggctgttagagagataattggaattaatttgactgtaaacacaaagatattagtacaaaatacgtgacgtagaaagtaataatttcttgggtagtttgcagttttaaaattatgttttaaaatggactatcatatgcttaccgtaacttgaaagtatttcgatttcttggctttatatatcttgtggaaaggacgaaacaccgaatttctactaagtgtagatcaggaggaagcgatggcttcagatttttttgaattctgatgcggtattttctccttacgcatctgtgcggtatttcacaccgcatacgtcaaagcaaccatagtacgcgccctgtagcggcgcattaagcgcggcgggtgtggtggttacgcgcagcgtgaccgctacacttgccagcgccttagcgcccgctcctttcgctttcttcccttcctttctcgccacgttcgccggctttccccgtcaagctctaaatcgggggctccctttagggttccgatttagtgctttacggcacctcgaccccaaaaaacttgatttgggtgatggttcacgtagtgggccatcgccctgatagacggtttttcgccctttgacgttggagtccacgttctttaatagtggactcttgttccaaactggaacaacactcaactctatctcgggctattcttttgatttataagggattttgccgatttcggtctattggttaaaaaatgagctgatttaacaaaaatttaacgcgaattttaacaaaatattaacgtttacaattttatggtgcactctcagtacaatctgctctgatgccgcatagttaagccagccccgacacccgccaacacccgctgacgcgccctgacgggcttgtctgctcccggcatccgcttacagacaagctgtgaccgtctccgggagctgcatgtgtcagaggttttcaccgtcatcaccgaaacgcgcgagacgaaagggcctcgtgatacgcctatttttataggttaatgtcatgataataatggtttcttagacgtcaggtggcacttttcggggaaatgtgcgcggaacccctatttgtttatttttctaaatacattcaaatatgtatccgctcatgagacaataaccctgataaatgcttcaataatattgaaaaaggaagagtatgagtattcaacatttccgtgtcgcccttattcccttttttgcggcattttgccttcctgtttttgctcacccagaaacgctggtgaaagtaaaagatgctgaagatcagttgggtgcacgagtgggttacatcgaactggatctcaacagcggtaagatccttgagagttttcgccccgaagaacgttttccaatgatgagcacttttaaagttctgctatgtggcgcggtattatcccgtattgacgccgggcaagagcaactcggtcgccgcatacactattctcagaatgacttggttgagtactcaccagtcacagaaaagcatcttacggatggcatgacagtaagagaattatgcagtgctgccataaccatgagtgataacactgcggccaacttacttctgacaacgatcggaggaccgaaggagctaaccgcttttttgcacaacatgggggatcatgtaactcgccttgatcgttgggaaccggagctgaatgaagccataccaaacgacgagcgtgacaccacgatgcctgtagcaatggcaacaacgttgcgcaaactattaactggcgaactacttactctagcttcccggcaacaattaatagactggatggaggcggataaagttgcaggaccacttctgcgctcggcccttccggctggctggtttattgctgataaatctggagccggtgagcgtggaagccgcggtatcattgcagcactggggccagatggtaagccctcccgtatcgtagttatctacacgacggggagtcaggcaactatggatgaacgaaatagacagatcgctgagataggtgcctcactgattaagcattggtaactgtcagaccaagtttactcatatatactttagattgatttaaaacttcatttttaatttaaaaggatctaggtgaagatcctttttgataatctcatgaccaaaatcccttaacgtgagttttcgttccactgagcgtcagaccccgtagaaaagatcaaaggatcttcttgagatcctttttttctgcgcgtaatctgctgcttgcaaacaaaaaaaccaccgctaccagcggtggtttgtttgccggatcaagagctaccaactctttttccgaaggtaactggcttcagcagagcgcagataccaaatactgttcttctagtgtagccgtagttaggccaccacttcaagaactctgtagcaccgcctacatacctcgctctgctaatcctgttaccagtggctgctgccagtggcgataagtcgtgtcttaccgggttggactcaagacgatagttaccggataaggcgcagcggtcgggctgaacggggggttcgtgcacacagcccagcttggagcgaacgacctacaccgaactgagatacctacagcgtgagctatgagaaagcgccacgcttcccgaagggagaaaggcggacaggtatccggtaagcggcagggtcggaacaggagagcgcacgagggagcttccagggggaaacgcctggtatctttatagtcctgtcgggtttcgccacctctgacttgagcgtcgatttttgtgatgctcgtcaggggggcggagcctatggaaaaacgccagcaacgcggcctttttacggttcctggccttttgctggccttttgctca

SEQ ID NO: 879 - DNA, 2528 bp, synthetic construct
  source 1..2528: mol_type = other DNA
gagggcctatttcccatgattccttcatatttgcatatacgatacaaggctgttagagagataattggaattaatttgactgtaaacacaaagatattagtacaaaatacgtgacgtagaaagtaataatttcttgggtagtttgcagttttaaaattatgttttaaaatggactatcatatgcttaccgtaacttgaaagtatttcgatttcttggctttatatatcttgtggaaaggacgaaacaccgaatttctactaagtgtagataggaggaggattcggaacccaatttttttttgaattcaggctaggtggaggctcagtgatgataagtctgcgatggtggatgcatgtgtcatggtcatagctgtttcctgtgtgaaattgttatccgctcagagggcacaatcctattccgcgctatccgacaatctccaagacattaggtggagttcagttcggcgtatggcatatgtcgctggaaagaacatgtgagcaaaaggccagcaaaaggccaggaaccgtaaaaaggccgcgttgctggcgtttttccataggctccgcccccctgacgagcatcacaaaaatcgacgctcaagtcagaggtggcgaaacccgacaggactataaagataccaggcgtttccccctggaagctccctcgtgcgctctcctgttccgaccctgccgcttaccggatacctgtccgcctttctcccttcgggaagcgtggcgctttctcatagctcacgctgtaggtatctcagttcggtgtaggtcgttcgctccaagctgggctgtgtgcacgaaccccccgttcagcccgaccgctgcgccttatccggtaactatcgtcttgagtccaacccggtaagacacgacttatcgccactggcagcagccactggtaacaggattagcagagcgaggtatgtaggcggtgctacagagttcttgaagtggtggcctaactacggctacactagaagaacagtatttggtatctgcgctctgctgaagccagttaccttcggaaaaagagttggtagctcttgatccggcaaacaaaccaccgctggtagcggtggtttttttgtttgcaagcagcagattacgcgcagaaaaaaaggatctcaagaagatcctttgatcttttctacggggtctgacgctctattcaacaaagccgccgtcccgtcaagtcagcgtaaatgggtagggggcttcaaatcgtcctcgtgataccaattcggagcctgcttttttgtacaaacttgttgataatggcaattcaaggatcttcacctagatccttttaaattaaaaatgaagttttaaatcaatctaaagtatatatgagtaaacttggtctgacagttaccaatgcttaatcagtgaggcacctatctcagcgatctgtctatttcgttcatccatagttgcctgactccccgtcgtgtagataactacgatacgggagggcttaccatctggccccagtgctgcaatgataccgcgagagccacgctcaccggctccagatttatcagcaataaaccagccagccggaagggccgagcgcagaagtggtcctgcaactttatccgcctccatccagtctattaattgttgccgggaagctagagtaagtagttcgccagttaatagtttgcgcaacgttgttgccattgctacaggcatcgtggtgtcacgctcgtcgtttggtatggcttcattcagctccggttcccaacgatcaaggcgagttacatgatcccccatgttgtgcaaaaaagcggttagctccttcggtcctccgatcgttgtcagaagtaagttggccgcagtgttatcactcatggttatggcagcactgcataattctcttactgtcatgccatccgtaagatgcttttctgtgactggtgagtactcaaccaagtcattctgagaatagtgtatgcggcgaccgagttgctcttgcccggcgtcaatacgggataataccgcgccacatagcagaactttaaaagtgctcatcattggaaaacgttcttcggggcgaaaactctcaaggatcttaccgctgttgagatccagttcgatgtaacccactcgtgcacccaactgatcttcagcatcttttactttcaccagcgtttctgggtgagcaaaaacaggaaggcaaaatgccgcaaaaaagggaataagggcgacacggaaatgttgaatactcatactcttcctttttcaatattattgaagcatttatcagggttattgtctcatgagcggatacatatttgaatgtatttagaaaaataaacaaataggggttccgcgcacatttccccgaaaagtgccagatacctgaaacaaaacccatcgtacggccaaggaagtctccaataactgtgatccaccacaagcgccagggttttcccagtcacgacgttgtaaaacgacggccagtcatgcataatccgcacgcatctggaataaggaagtgccattccgcctgacct

SEQ ID NO: 880 - DNA, 2527 bp, synthetic construct
  source 1..2527: mol_type = other DNA
gagggcctatttcccatgattccttcatatttgcatatacgatacaaggctgttagagagataattggaattaatttgactgtaaacacaaagatattagtacaaaatacgtgacgtagaaagtaataatttcttgggtagtttgcagttttaaaattatgttttaaaatggactatcatatgcttaccgtaacttgaaagtatttcgatttcttggctttatatatcttgtggaaaggacgaaacaccgaatttctactaagtgtagatcccaaggcagagcaggctgggtgtttttttgaattcaggctaggtggaggctcagtgatgataagtctgcgatggtggatgcatgtgtcatggtcatagctgtttcctgtgtgaaattgttatccgctcagagggcacaatcctattccgcgctatccgacaatctccaagacattaggtggagttcagttcggcgtatggcatatgtcgctggaaagaacatgtgagcaaaaggccagcaaaaggccaggaaccgtaaaaaggccgcgttgctggcgtttttccataggctccgcccccctgacgagcatcacaaaaatcgacgctcaagtcagaggtggcgaaacccgacaggactataaagataccaggcgtttccccctggaagctccctcgtgcgctctcctgttccgaccctgccgcttaccggatacctgtccgcctttctcccttcgggaagcgtggcgctttctcatagctcacgctgtaggtatctcagttcggtgtaggtcgttcgctccaagctgggctgtgtgcacgaaccccccgttcagcccgaccgctgcgccttatccggtaactatcgtcttgagtccaacccggtaagacacgacttatcgccactggcagcagccactggtaacaggattagcagagcgaggtatgtaggcggtgctacagagttcttgaagtggtggcctaactacggctacactagaagaacagtatttggtatctgcgctctgctgaagccagttaccttcggaaaaagagttggtagctcttgatccggcaaacaaaccaccgctggtagcggtggtttttttgtttgcaagcagcagattacgcgcagaaaaaaaggatctcaagaagatcctttgatcttttctacggggtctgacgctctattcaacaaagccgccgtcccgtcaagtcagcgtaaatgggtagggggcttcaaatcgtcctcgtgataccaattcggagcctgcttttttgtacaaacttgttgataatggcaattcaaggatcttcacctagatccttttaaattaaaaatgaagttttaaatcaatctaaagtatatatgagtaaacttggtctgacagttaccaatgcttaatcagtgaggcacctatctcagcgatctgtctatttcgttcatccatagttgcctgactccccgtcgtgtagataactacgatacgggagggcttaccatctggccccagtgctgcaatgataccgcgagagccacgctcaccggctccagatttatcagcaataaaccagccagccggaagggccgagcgcagaagtggtcctgcaactttatccgcctccatccagtctattaattgttgccgggaagctagagtaagtagttcgccagttaatagtttgcgcaacgttgttgccattgctacaggcatcgtggtgtcacgctcgtcgtttggtatggcttcattcagctccggttcccaacgatcaaggcgagttacatgatcccccatgttgtgcaaaaaagcggttagctccttcggtcctccgatcgttgtcagaagtaagttggccgcagtgttatcactcatggttatggcagcactgcataattctcttactgtcatgccatccgtaagatgcttttctgtgactggtgagtactcaaccaagtcattctgagaatagtgtatgcggcgaccgagttgctcttgcccggcgtcaatacgggataataccgcgccacatagcagaactttaaaagtgctcatcattggaaaacgttcttcggggcgaaaactctcaaggatcttaccgctgttgagatccagttcgatgtaacccactcgtgcacccaactgatcttcagcatcttttactttcaccagcgtttctgggtgagcaaaaacaggaaggcaaaatgccgcaaaaaagggaataagggcgacacggaaatgttgaatactcatactcttcctttttcaatattattgaagcatttatcagggttattgtctcatgagcggatacatatttgaatgtatttagaaaaataaacaaataggggttccgcgcacatttccccgaaaagtgccagatacctgaaacaaaacccatcgtacggccaaggaagtctccaataactgtgatccaccacaagcgccagggttttcccagtcacgacgttgtaaaacgacggccagtcatgcataatccgcacgcatctggaataaggaagtgccattccgcctgacct

SEQ ID NO: 881 - DNA, 2527 bp, synthetic construct
  source 1..2527: mol_type = other DNA
gagggcctatttcccatgattccttcatatttgcatatacgatacaaggctgttagagagataattggaattaatttgactgtaaacacaaagatattagtacaaaatacgtgacgtagaaagtaataatttcttgggtagtttgcagttttaaaattatgttttaaaatggactatcatatgcttaccgtaacttgaaagtatttcgatttcttggctttatatatcttgtggaaaggacgaaacaccgaatttctactaagtgtagatctgcctccagggatcctgtgtcctttttttgaattcaggctaggtggaggctcagtgatgataagtctgcgatggtggatgcatgtgtcatggtcatagctgtttcctgtgtgaaattgttatccgctcagagggcacaatcctattccgcgctatccgacaatctccaagacattaggtggagttcagttcggcgtatggcatatgtcgctggaaagaacatgtgagcaaaaggccagcaaaaggccaggaaccgtaaaaaggccgcgttgctggcgtttttccataggctccgcccccctgacgagcatcacaaaaatcgacgctcaagtcagaggtggcgaaacccgacaggactataaagataccaggcgtttccccctggaagctccctcgtgcgctctcctgttccgaccctgccgcttaccggatacctgtccgcctttctcccttcgggaagcgtggcgctttctcatagctcacgctgtaggtatctcagttcggtgtaggtcgttcgctccaagctgggctgtgtgcacgaaccccccgttcagcccgaccgctgcgccttatccggtaactatcgtcttgagtccaacccggtaagacacgacttatcgccactggcagcagccactggtaacaggattagcagagcgaggtatgtaggcggtgctacagagttcttgaagtggtggcctaactacggctacactagaagaacagtatttggtatctgcgctctgctgaagccagttaccttcggaaaaagagttggtagctcttgatccggcaaacaaaccaccgctggtagcggtggtttttttgtttgcaagcagcagattacgcgcagaaaaaaaggatctcaagaagatcctttgatcttttctacggggtctgacgctctattcaacaaagccgccgtcccgtcaagtcagcgtaaatgggtagggggcttcaaatcgtcctcgtgataccaattcggagcctgcttttttgtacaaacttgttgataatggcaattcaaggatcttcacctagatccttttaaattaaaaatgaagttttaaatcaatctaaagtatatatgagtaaacttggtctgacagttaccaatgcttaatcagtgaggcacctatctcagcgatctgtctatttcgttcatccatagttgcctgactccccgtcgtgtagataactacgatacgggagggcttaccatctggccccagtgctgcaatgataccgcgagagccacgctcaccggctccagatttatcagcaataaaccagccagccggaagggccgagcgcagaagtggtcctgcaactttatccgcctccatccagtctattaattgttgccgggaagctagagtaagtagttcgccagttaatagtttgcgcaacgttgttgccattgctacaggcatcgtggtgtcacgctcgtcgtttggtatggcttcattcagctccggttcccaacgatcaaggcgagttacatgatcccccatgttgtgcaaaaaagcggttagctccttcggtcctccgatcgttgtcagaagtaagttggccgcagtgttatcactcatggttatggcagcactgcataattctcttactgtcatgccatccgtaagatgcttttctgtgactggtgagtactcaaccaagtcattctgagaatagtgtatgcggcgaccgagttgctcttgcccggcgtcaatacgggataataccgcgccacatagcagaactttaaaagtgctcatcattggaaaacgttcttcggggcgaaaactctcaaggatcttaccgctgttgagatccagttcgatgtaacccactcgtgcacccaactgatcttcagcatcttttactttcaccagcgtttctgggtgagcaaaaacaggaaggcaaaatgccgcaaaaaagggaataagggcgacacggaaatgttgaatactcatactcttcctttttcaatattattgaagcatttatcagggttattgtctcatgagcggatacatatttgaatgtatttagaaaaataaacaaataggggttccgcgcacatttccccgaaaagtgccagatacctgaaacaaaacccatcgtacggccaaggaagtctccaataactgtgatccaccacaagcgccagggttttcccagtcacgacgttgtaaaacgacggccagtcatgcataatccgcacgcatctggaataaggaagtgccattccgcctgacct

SEQ ID NO: 882 - DNA, 2527 bp, synthetic construct
  source 1..2527: mol_type = other DNA
gagggcctatttcccatgattccttcatatttgcatatacgatacaaggctgttagagagataattggaattaatttgactgtaaacacaaagatattagtacaaaatacgtgacgtagaaagtaataatttcttgggtagtttgcagttttaaaattatgttttaaaatggactatcatatgcttaccgtaacttgaaagtatttcgatttcttggctttatatatcttgtggaaaggacgaaacaccgaatttctactaagtgtagatctttacagggccagcgggctggatttttttgaattcaggctaggtggaggctcagtgatgataagtctgcgatggtggatgcatgtgtcatggtcatagctgtttcctgtgtgaaattgttatccgctcagagggcacaatcctattccgcgctatccgacaatctccaagacattaggtggagttcagttcggcgtatggcatatgtcgctggaaagaacatgtgagcaaaaggccagcaaaaggccaggaaccgtaaaaaggccgcgttgctggcgtttttccataggctccgcccccctgacgagcatcacaaaaatcgacgctcaagtcagaggtggcgaaacccgacaggactataaagataccaggcgtttccccctggaagctccctcgtgcgctctcctgttccgaccctgccgcttaccggatacctgtccgcctttctcccttcgggaagcgtggcgctttctcatagctcacgctgtaggtatctcagttcggtgtaggtcgttcgctccaagctgggctgtgtgcacgaaccccccgttcagcccgaccgctgcgccttatccggtaactatcgtcttgagtccaacccggtaagacacgacttatcgccactggcagcagccactggtaacaggattagcagagcgaggtatgtaggcggtgctacagagttcttgaagtggtggcctaactacggctacactagaagaacagtatttggtatctgcgctctgctgaagccagttaccttcggaaaaagagttggtagctcttgatccggcaaacaaaccaccgctggtagcggtggtttttttgtttgcaagcagcagattacgcgcagaaaaaaaggatctcaagaagatcctttgatcttttctacggggtctgacgctctattcaacaaagccgccgtcccgtcaagtcagcgtaaatgggtagggggcttcaaatcgtcctcgtgataccaattcggagcctgcttttttgtacaaacttgttgataatggcaattcaaggatcttcacctagatccttttaaattaaaaatgaagttttaaatcaatctaaagtatatatgagtaaacttggtctgacagttaccaatgcttaatcagtgaggcacctatctcagcgatctgtctatttcgttcatccatagttgcctgactccccgtcgtgtagataactacgatacgggagggcttaccatctggccccagtgctgcaatgataccgcgagagccacgctcaccggctccagatttatcagcaataaaccagccagccggaagggccgagcgcagaagtggtcctgcaactttatccgcctccatccagtctattaattgttgccgggaagctagagtaagtagttcgccagttaatagtttgcgcaacgttgttgccattgctacaggcatcgtggtgtcacgctcgtcgtttggtatggcttcattcagctccggttcccaacgatcaaggcgagttacatgatcccccatgttgtgcaaaaaagcggttagctccttcggtcctccgatcgttgtcagaagtaagttggccgcagtgttatcactcatggttatggcagcactgcataattctcttactgtcatgccatccgtaagatgcttttctgtgactggtgagtactcaaccaagtcattctgagaatagtgtatgcggcgaccgagttgctcttgcccggcgtcaatacgggataataccgcgccacatagcagaactttaaaagtgctcatcattggaaaacgttcttcggggcgaaaactctcaaggatcttaccgctgttgagatccagttcgatgtaacccactcgtgcacccaactgatcttcagcatcttttactttcaccagcgtttctgggtgagcaaaaacaggaaggcaaaatgccgcaaaaaagggaataagggcgacacggaaatgttgaatactcatactcttcctttttcaatattattgaagcatttatcagggttattgtctcatgagcggatacatatttgaatgtatttagaaaaataaacaaataggggttccgcgcacatttccccgaaaagtgccagatacctgaaacaaaacccatcgtacggccaaggaagtctccaataactgtgatccaccacaagcgccagggttttcccagtcacgacgttgtaaaacgacggccagtcatgcataatccgcacgcatctggaataaggaagtgccattccgcctgacct

SEQ ID NO: 883 - protein, 24 aa, synthetic construct
SGGSSGSETPGTSESATPESSGGS

SEQ ID NO: 884 - protein, 166 aa, synthetic construct
SEVEFSHEYWMRHALTLAKRARDEREVPVGAVLVLNNRVIGEGWNRAIGLHDPTAHAEIMALRQGGLVMQNYRLIDATLYVTFEPCVMCAGAMIHSRIGRVVFGVRNSKRGAAGSLMNVLNYPGMNHRVEITEGILADECAALLCDFYRMPRQVFNAQKKAQSSIN

SEQ ID NO: 885 - protein, 13 aa, synthetic construct
GSPKKKRKVSGGS

SEQ ID NO: 886 - DNA, 10368 bp, synthetic construct
  source 1..10368: mol_type = other DNA
gacattgattattgactagttattaatagtaatcaattacggggtcattagttcatagcccatatatggagttccgcgttacataacttacggtaaatggcccgcctggctgaccgcccaacgacccccgcccattgacgtcaataatgacgtatgttcccatagtaacgccaatagggactttccattgacgtcaatgggtggagtatttacggtaaactgcccacttggcagtacatcaagtgtatcatatgccaagtacgccccctattgacgtcaatgacggtaaatggcccgcctggcattatgcccagtacatgaccttatgggactttcctacttggcagtacatctacgtattagtcatcgctattaccatggtgatgcggttttggcagtacatcaatgggcgtggatagcggtttgactcacggggatttccaagtctccaccccattgacgtcaatgggagtttgttttggcaccaaaatcaacgggactttccaaaatgtcgtaacaactccgccccattgacgcaaatgggcggtaggcgtgtacggtgggaggtctatataagcagagctggtttagtgaaccgtcagatccgctagagatccgcggccgctaatacgactcactatagggagagccgccaccatgaaacggacagccgacggaagcgagttcgagtcaccaaagaagaagcggaaagtcacacttaatattgaggatgaacatagattgcacgagacctctaaggaacctgatgtttctcttggatcaacttggttgtcagatttcccacaagcatgggcagagaccggaggtatgggtcttgctgttaggcaggcaccacttattattcctttgaaggcaacctctactcctgtgtcaattaagcaatatccaatgtctcaggaagctaggcttggaattaagcctcacattcaaagacttttggatcagggtattttggtgccatgtcaatcaccttggaacacaccacttttgcctgttaagaagcctggaactaatgattacagaccagtgcaagatttgagggaggttaacaagagagtggaagatattcacccaactgttccaaacccttataatcttttgtctggattgccaccttcacatcaatggtacactgtgcttgatttgaaggatgcatttttctgccttaggttgcatccaacatctcagcctctttttgctttcgagtggagagatcctgaaatgggaatttctggtcaacttacatggaccaggttgcctcagggtttcaagaactcaccaaccttgtttaatgaggcacttcacagggatttggctgattttaggattcaacatcctgatcttatccttttgcagtatgttgatgatcttttgcttgctgcaacttctgaattggattgtcaacagggaactagggcattgcttcaaacacttggaaatttgggttacagagcttcagcaaagaaggctcagatttgccaaaagcaggttaagtatcttggatacttgcttaaggaaggacaaaggtggttgaccgaggctagaaaggaaactgtgatgggtcaaccaacacctaagacccctaggcagcttagagagttcttgggaaaggcaggtttttgtaggcttttcattccaggatttgctgaaatggctgcaccactttatcctttgaccaagcctggaactttgtttaactggggtccagatcaacagaaggcataccaagaaattaagcaggctttgcttactgctccagcacttggtttgcctgatcttacaaagccatttgagttgttcgttgatgaaaagcaaggatatgcaaagggtgtgcttacccagaagttgggaccttggagaaggcctgttgcttacctttctaagaaacttgatccagtggctgcaggttggccaccttgtcttagaatggttgctgcaattgcagtgcttacaaaggatgctggaaagttgactatgggacaacctcttgttattttggcaccacacgctgttgaggcacttgtgaagcagccacctgataggtggttgtcaaacgcaagaatgacccattatcaagctcttcttttggatactgatagggtgcagttcggtcctgttgtggctttgaatccagcaacacttttgccacttcctgaggaaggattgcaacacaactgccttgatattttggctgaggcacatggtacaagacctgatcttaccgatcagccattgcctgatgctgatcacacttggtacacagatggatcttcacttttgcaagaaggacagaggaaggctggtgctgcagttactacagagactgaagtgatttgggctaaggcacttccagctggaacatctgctcaaagagcagagcttattgctttgacccaggcacttaagatggctgaaggaaagaagttgaacgtttacactgattctaggtatgctttcgcaacagctcatattcacggagaaatctatagaaggagaggatggttgacatcagagggaaaggaaattaagaacaaggatgaaattcttgcacttttgaaggctctttttcttcctaagagattgtctattattcattgcccaggacaccaaaagggtcattcagcagaagctaggggaaatagaatggctgatcaggctgcaagaaaggctgcaattactgagacacctgatacctctactcttttgatcgaaaactcttcaccaaattcaaggcttattaactctggtggttcaagcggaggctcatctggcagcgaaactccgggcacttccgagtcagctactcctgagtctagcggcgggtcgtcaggagggtcttccaagctggagaagtttacaaactgttacagcctctccaaaaccctcaggtttaaagcgatcccggtgggcaagacccaggagaacatcgacaacaagaggctcctggtggaagacgagaagcgcgccgaagactacaagggcgtgaagaagctgctcgataggtactacctcagctttattaacgacgtgctgcacagcatcaaactcaagaatctcaacaactacatctccctcttccgcaaaaagacccgcaccgagaaggagaacaaggagctggagaacctggagatcaacctccgcaaggaaatcgccaaagcgttcaagggcaatgaagggtacaagagcctcttcaagaaagacatcatcgaaactatcctcccagagtttctcgatgacaaggacgagatcgcgctggtgaactcctttaacgggttcacaaccgcgtttaccggcttctttgataacagggaaaatatgttctccgaggaggccaagtccaccagcatcgccttcaggtgtatcaacgagaacctcacccgctacatttccaatatggacattttcgagaaggtggatgcgatcttcgataagcacgaggtgcaggagatcaaagagaagattctcaattccgattatgacgtcgaggatttcttcgaaggggagttctttaattttgtgctcacacaagagggcattgacgtgtacaacgcgattatcgggggcttcgtcacagagtccggggagaagattaaggggctgaatgagtacatcaatctgtacaatcagaagaccaagcagaaactgccgaaattcaagccgctctacaagcaagtcctgtccgatagggaaagcctctccttctacggcgagggctataccagcgacgaggaggtgctggaagtcttccgcaacacactgaataagaatagcgagattttctcctccatcaagaagctcgagaagctctttaagaactttgacgagtacagctccgccgggattttcgtgaagaacgggccggcgatcagcaccatctccaaggacatctttggcgagtggaacgtcatcagggacaagtggaacgccgagtacgacgacatccacctgaagaagaaggcggtggtgaccgagaagtatgaggacgatcgcaggaagtccttcaaaaaaatcggctccttcagcctcgaacagctccaggagtatgccgatgcggatctgtccgtcgtcgagaagctgaaggaaatcatcattcagaaggtcgacgagatctataaagtgtacgggtccagcgagaagctgttcgacgccgactttgtgctcgagaagtccctcaaaaagaatgacgccgtggtggccattatgaaagacctgctcgactccgtgaagtccttcgaaaattacattaaagcgttctttggggaggggaaggaaactaacagggatgagtccttctatggcgactttgtcctcgcgtacgacatcctgctgaaggtcgaccacatttacgacgcgatccgcaactacgtgacacagaagccgtactccaaagacaagttcaagctgtacttccagaacccgcaatttatggggggctgggacaaggataaagagacagactaccgcgcgacaattctccgctatggctccaaatactatctggccatcatggacaagaagtacgcgaagtgcctgcagaagatcgacaaagacgacgtcaatggcaactatgaaaagatcaactacaagctgctgccgggcccgaacaagatgctcccgaaggtgttcttcagcaagaagtggatggcctactacaatccaagcgaggatattcagaaaatctataaaaacgggaccttcaagaagggggacatgtttaacctcaacgactgccacaagctcattgatttcttcaaggatagcatttcccgctacccgaaatggtccaatgcgtacgattttaacttctccgagacagaaaagtacaaagacatcgcgggcttttacagggaggtggaggagcaagggtataaagtttcttttgaatccgcgagcaagaaggaagtcgacaagctcgtcgaggagggcaagctctacatgttccaaatttataacaaggacttttccgacaagagccatgggaccccaaacctccacaccatgtacttcaaactgctctttgacgagaacaaccacgggcaaatcaggctgagcggcggcgccgaattattcatgcgcagggcctccctcaagaaggaagagctggtcgtccatccagccaattccccgatcgcgaacaagaacccggacaatccgaaaaagaccaccaccctgtcctacgacgtctacaaggacaaacgcttcagcgaagaccagtacgaattacacatcccaattgcgattaataagtgcccaaagaatatcttcaaaattaatacagaggtcagggtgctgctcaaacacgacgacaatccgtatgtcatcggcattgacaggggcgagcgcaatctgctctatatcgtggtcgtggatgggaagggcaatattgtggagcagtactccctgaacgagattatcaacaacttcaatgggattaggattaagaccgactatcacagcctgctcgacaagaaagaaaaagagaggtttgaggcccgccaaaactggacctccattgagaatatcaaagaattaaaggccggctatatttcccaagtcgtccacaagatctgcgagctggtggagaaatatgacgccgtgattgcgctcgaagacttaaattctgggttcaagaactcccgcgtgaaggtggaaaaacaggtgtatcagaaattcgagaaaatgctgatcgacaaactcaattatatggtggataagaagtccaacccgtgtgccacagggggcgcgctgaagggctatcagatcaccaacaagttcgagagcttcaagagcatgagcacccagaacgggtttattttctacatcccggcgtggctcacctccaagattgacccgagcaccggcttcgtgaacctcctgaagacaaagtatacctccattgccgacagcaagaagtttatctcctccttcgaccgcattatgtatgtgccggaggaggacctcttcgagttcgccctcgactacaaaaacttcagccgcacagatgcggattacatcaagaagtggaagctgtactcctacgggaacaggatccgcatcttcaggaatccaaaaaaaaataacgtctttgactgggaggaagtgtgcctgacatccgcctacaaggaactgttcaataaatacggcatcaattaccagcagggcgacattcgcgccctcctctgtgagcagtccgacaaagcgttttactccagcttcatggccctcatgtccctgatgctccaaatgaggaatagcatcacagggcgcaccgacgtcgacttcctcatcagcccggtgaagaactccgacgggatcttttacgactcccgcaactatgaggcgcaagagaatgcgatcctcccgaagaacgccgatgcgaacggggcctataatatcgccaggaaagtgctctgggccatcgggcagttcaaaaaggcggaggatgagaagctcgacaaggtgaaaattgccatttccaacaaggagtggctggagtacgcgcagacctccgtgaagcactctggtggttcaagcggaggctcatctggcagcgaaactccgggcacttccgagtcagctactcctgagtctagcggcgggtcgtcaggagggtctgctcttgattttctttctaggcttccattgccacctccagtttctccaatttgtacttttgtgtcacctgctgcacaaaaggcattccagcctccaaggtcatgcggatctggcggctcaaaaagaaccgccgacggcagcgaattcgagcccaagaagaagaggaaagtcggaagcggagctactaacttcagcctgctgaagcaggctggagacgtggaggagaaccctggacctatggtgagcaagggcgaggagctgttcaccggggtggtgcccatcctggtcgagctggacggcgacgtaaacggccacaagttcagcgtgtccggcgagggcgagggcgatgccacctacggcaagctgaccctgaagttcatctgcaccaccggcaagctgcccgtgccctggcccaccctcgtgaccaccctgacctatggagtgcagtgcttcagccgctaccccgaccacatgaagcagcacgacttcttcaagtccgccatgcccgaaggctacgtccaggagcgcaccatcttcttcaaggacgacggcaactacaagacccgcgccgaggtgaagttcgagggcgacaccctggtgaaccgcatcgagctgaagggcatcgacttcaaggaggacggcaacatcctggggcacaagctggagtacaactacaacagccacaacgtctatatcatggccgacaagcagaagaacggcatcaaggtgaacttcaagatccgccacaacatcgaggacggcagcgtgcagctcgccgaccactaccagcagaacacccccatcggcgacggccccgtgctgctgcccgacaaccactacctgagcacccagtccgccctgagcaaagaccccaacgagaagcgcgatcacatggtcctgctggagttcgtgaccgccgccgggatcactctcggcatggacgagctgtacaagtctggtggttctcccaagaagaagaggaaagtctaaccggtcatcatcaccatcaccattgagtttaaacccgctgatcagcctcgactgtgccttctagttgccagccatctgttgtttgcccctcccccgtgccttccttgaccctggaaggtgccactcccactgtcctttcctaataaaatgaggaaattgcatcgcattgtctgagtaggtgtcattctattctggggggtggggtggggcaggacagcaagggggaggattgggaagacaatagcaggcatgctggggatgcggtgggctctatggcttctgaggcggaaagaaccagctggggctcgataccgtcgacctctagctagagcttggcgtaatcatggtcatagctgtttcctgtgtgaaattgttatccgctcacaattccacacaacatacgagccggaagcataaagtgtaaagcctagggtgcctaatgagtgagctaactcacattaattgcgttgcgctcactgcccgctttccagtcgggaaacctgtcgtgccagctgcattaatgaatcggccaacgcgcggggagaggcggtttgcgtattgggcgctcttccgcttcctcgctcactgactcgctgcgctcggtcgttcggctgcggcgagcggtatcagctcactcaaaggcggtaatacggttatccacagaatcaggggataacgcaggaaagaacatgtgagcaaaaggccagcaaaaggccaggaaccgtaaaaaggccgcgttgctggcgtttttccataggctccgcccccctgacgagcatcacaaaaatcgacgctcaagtcagaggtggcgaaacccgacaggactataaagataccaggcgtttccccctggaagctccctcgtgcgctctcctgttccgaccctgccgcttaccggatacctgtccgcctttctcccttcgggaagcgtggcgctttctcatagctcacgctgtaggtatctcagttcggtgtaggtcgttcgctccaagctgggctgtgtgcacgaaccccccgttcagcccgaccgctgcgccttatccggtaactatcgtcttgagtccaacccggtaagacacgacttatcgccactggcagcagccactggtaacaggattagcagagcgaggtatgtaggcggtgctacagagttcttgaagtggtggcctaactacggctacactagaagaacagtatttggtatctgcgctctgctgaagccagttaccttcggaaaaagagttggtagctcttgatccggcaaacaaaccaccgctggtagcggtggtttttttgtttgcaagcagcagattacgcgcagaaaaaaaggatctcaagaagatcctttgatcttttctacggggtctgacactcagtggaacgaaaactcacgttaagggattttggtcatgagattatcaaaaaggatcttcacctagatccttttaaattaaaaatgaagttttaaatcaatctaaagtatatatgagtaaacttggtctgacagttaccaatgcttaatcagtgaggcacctatctcagcgatctgtctatttcgttcatccatagttgcctgactccccgtcgtgtagataactacgatacgggagggcttaccatctggccccagtgctgcaatgataccgcgagacccacgctcaccggctccagatttatcagcaataaaccagccagccggaagggccgagcgcagaagtggtcctgcaactttatccgcctccatccagtctattaattgttgccgggaagctagagtaagtagttcgccagttaatagtttgcgcaacgttgttgccattgctacaggcatcgtggtgtcacgctcgtcgtttggtatggcttcattcagctccggttcccaacgatcaaggcgagttacatgatcccccatgttgtgcaaaaaagcggttagctccttcggtcctccgatcgttgtcagaagtaagttggccgcagtgttatcactcatggttatggcagcactgcataattctcttactgtcatgccatccgtaagatgcttttctgtgactggtgagtactcaaccaagtcattctgagaatagtgtatgcggcgaccgagttgctcttgcccggcgtcaatacgggataataccgcgccacatagcagaactttaaaagtgctcatcattggaaaacgttcttcggggcgaaaactctcaaggatcttaccgctgttgagatccagttcgatgtaacccactcgtgcacccaactgatcttcagcatcttttactttcaccagcgtttctgggtgagcaaaaacaggaaggcaaaatgccgcaaaaaagggaataagggcgacacggaaatgttgaatactcatactcttcctttttcaatattattgaagcatttatcagggttattgtctcatgagcggatacatatttgaatgtatttagaaaaataaacaaataggggttccgcgcacatttccccgaaaagtgccacctgacgtcgacggatcgggagatcgatctcccgatcccctagggtcgactctcagtacaatctgctctgatgccgcatagttaagccagtatctgctccctgcttgtgtgttggaggtcgctgagtagtgcgcgagcaaaatttaagctacaacaaggcaaggcttgaccgacaattgcatgaagaatctgcttagggttaggcgttttgcgctgcttcgcgatgtacgggccagatatacgcgtt

SEQ ID NO: 887 - DNA, 5000 bp, Homo sapiens
  source 1..5000: mol_type = genomic DNA
ggcctaggtgagatgtgcaggctatgggcttggaaatgaggggagaatccccttgccctcactccatccatcgaggccgggcaccaacccttcctgggccagctttccagcccctggctggctgctctgcaggcactgaatgccagctgcccccatccccatgccagtgctctaaaatcagtgctctcaaacaagggcagatggcgcagtggaagttctggcaagaggggactgtgaggggaagtcctggggtaggtgggacagagaggactgcctgggaagggtgtaggggcagcacctcctgggcatgaaaccatctgcagggcacaggggccaggcctgcctctgcatgcactgcttggccttgtggctaaggcctgtgctttacccagttctctgggagcaggagcagtctttctgaggcctgccctcagccctgcccagggttcaaggatctctcctcagcatcattgctgctgccaaaaccaagaggctacccaccattcctcacccgcaactctgccacgcagcaccgtctgcacagctgcagttggccacatccacttgcttttaaatgtgctgtcatttcctggaaaccatccaggccttgtagcctgccctctgcacctcctccccaaggggggcctctggagcaagaatccaagaggtgccctggcagctgcaagtgtccccagaacatttcctctatgcatgaaggactgaagcccagagggggaagggacttagctgagaatcagtacccaggatcctcctgccaacgctgaagatggtttgggtctggcctgactctgcaaagccaagtaaagaaccacggagtcagggagagttgacagatgaaggctttctccacagcccacaagcactaagtccagtccaggagccaggatgagcctcccagattatgcatgagaggacattaagggctgtgtcctggacactgaacagatgctggaggaggagggaaaagaggcttcctggaggagatggcttagaaccatagacctgccctctgcctcatgcctcctccatcatggaggatggttgtccagtttctgtttgaaccccaccccataccttgccagggctctcactgccagacacagaatagggggctccctgggttcaaagtagagctcacttctgtcccctgggcttctcctgactgttccttgtgtgacctgttcccacatctggatgggctgcaggagccagtgctgtggggacagaaggtctggagctgcccgtgaagggcagaatgctgccctcagacccgcttcctccctgtccttgtctgtccaaggagaatgaggtctcactggtggatttcggactaccctgaggagctggcacctgagggacaaggccccccacctgcccagctccagcctctgatgaggggtgggagagagctacatgaggttgctaagaaagcctcccctgaaggagaccacacagtgtgtgaggttggagtctctagcagcgggttctgtgcccccagggatagtctggctgtccaggcactgctcttgatataaacaccacctcctagttatgaaaccatgcccattctgcctctctgtatggaaaagagcatggggctggcccgtggggtggtgtccactttaggccctgtgggagatcatgggaacccacgcagtgggtcataggctctctcatttactactcacatccactctgtgaagaagcgattatgatctctcctctagaaactcgtagagtcccatgtctgccggcttccagagcctgcactcctccaccttggcttggctttgctggggctagaggagctaggatgcacagcagctctgtgaccctttgtttgagaggaacaggaaaaccacccttctctctggcccactgtgtcctcttcctgccctgccatccccttctgtgaatgttagacccatgggagcagctggtcagaggggaccccggcctggggcccctaaccctatgtagcctcagtcttcccatcaggctctcagctcagcctgagtgttgaggccccagtggctgctctgggggcctcctgagtttctcatctgtgcccctccctccctggcccaggtgaaggtgtggttccagaaccggaggacaaagtacaaacggcagaagctggaggaggaagggcctgagtccgagcagaagaagaagggctcccatcacatcaaccggtggcgcattgccacgaagcaggccaatggggaggacatcgatgtcacctccaatgactagggtgggcaaccacaaacccacgagggcagagtgctgcttgctgctggccaggcccctgcgtgggcccaagctggactctggccactccctggccaggctttggggaggcctggagtcatggccccacagggcttgaagcccggggccgccattgacagagggacaagcaatgggctggctgaggcctgggaccacttggccttctcctcggagagcctgcctgcctgggcgggcccgcccgccaccgcagcctcccagctgctctccgtgtctccaatctcccttttgttttgatgcatttctgttttaatttattttccaggcaccactgtagtttagtgatccccagtgtcccccttccctatgggaataataaaagtctctctcttaatgacacgggcatccagctccagccccagagcctggggtggtagattccggctctgagggccagtgggggctggtagagcaaacgcgttcagggcctgggagcctggggtggggtactggtggagggggtcaagggtaattcattaactcctctcttttgttgggggaccctggtctctacctccagctccacagcaggagaaacaggctagacatagggaagggccatcctgtatcttgagggaggacaggcccaggtctttcttaacgtattgagaggtgggaatcaggcccaggtagttcaatgggagagggagagtgcttccctctgcctagagactctggtggcttctccagttgaggagaaaccagaggaaaggggaggattggggtctgggggagggaacaccattcacaaaggctgacggttccagtccgaagtcgtgggcccaccaggatgctcacctgtccttggagaaccgctgggcaggttgagactgcagagacagggcttaaggctgagcctgcaaccagtccccagtgactcagggcctcctcagcccaagaaagagcaacgtgccagggcccgctgagctcttgtgttcacctgcccttctgtttgtcccacttgtcaggatgaaggtttcctgacaagcaaatctgcattcctaagtctttcccttacgacatccagacccctctctttcttcttcacctcccatgtgctcatgaaacctctgctctttggcctccatgccaccattctgccggtgctaatgacagtcaccaaccacagtcactggccacccccttgtggccaaactcaaccacttcctgttgggttcacctgctccctgatctgttggctatgccctcctggattctcccaccccgctctgccttcatttcggtagctctgactcctccttcagcctgagttcattcagtgtgatccatgccttgtcacctctggccacccccaggtcagtccttgctctccctgactcctcattatgtcctttgccttgtggggatcacatccacttccaggacttctctttggctccctggcctgtgtctttagctgacctctgctgagctgcagacccgtcaagccagctgcctgctccaccccctgcccctcagcacctcaaagcccatacatccacagccggacgcacctacccatctgtgcttctccaggatcacccacctcgacaaacagcattagacatgtacacagtttcccaagctacaggaaatctgggaatcttcctcaagcttcctctcctcttccccagccccatccattcccatctagtgggttgagtctagactggcttcccaaccacacctccctaatgcagcaccccctacccccctgcccagctccctctgccaccggcctggcctgggccctgctcctctagggaggtttctgtgaatgtcaaggatgaggtccacttcaaaggaggccctccatgttgcagctaggtttctcttccttgcacccaaacagggcagactcacccccttctgagcccctttgccccatcttcttgccttgctcccggtaccctttgcttcagcatccccatccctgtccctgagtgagccacaggttttccctgtgctgtgccttcgctcatgctgttcttcccacctggaatgtcgggtgcttgatcaatgtggaactcactggaaagatgtcagagacccagccttgctgtctgggccacatgcagggatccaagcacacaaggtccttctgctgggagcacagacccaggtcccactcgcactctcagcgtctctctcccacctctgcccacctcacttgtgtccagtcagtgctagaaaccaaagggctttgtcccatcccaacaccccctctccctccatcagtcaggaatgcattctgcacatcttgaaagtcctaacatggataagtccagattaacccacatggcgaccctcactgccaagcaggtgggatcacttctgggagcacacatgcccaggtgtggaaggaaggtgggaggaagagtcatccttttggccccagtgggggacagagaaaggggtgagctgttcctctcaagatcctgcctcacttggtagggggagggggtccaggaagatcacagcagagcaccccctgtcatccgaataaagggctggaagggacccaaggaaacctgccagtctcccgaggccaggcctgcggggggcggggcggggagtccctgccgcactcccatccaccccccatgttgtgcctctccctgcagacggtaaatattggtgttgtgacttcattaataaaggcttct

SEQ ID NO: 888 - DNA, 5000 bp, Homo sapiens
  source 1..5000: mol_type = genomic DNA
ttcgggatgtttcattctcctgcttcaatccactctcacttcttcaggtctcttgctcaattgtctgctgggacagcctctactgcttgccgggttggtttcactgttcatggaacccgtgtctttattttcctggcattctccttcattttcctgttgcactttttggtggttgttgttgtcccactgcttcactgcccttcccccaccagcagaacttggacgcttttgagctctgtgatttgggacaagcaatgggacctccctgaccctcagctttctcctctgtgaagatgataataccttccccacaggatgaattgagatgatggagtggagagtgctcagggctgtggctggcatgttgtaggagatcagaaatggtggcccatctggagctaagcagtgacgcagctaactcggtgcttcagtgctcctcctccctccgctcctctccccatctccctcaacaggacttcttctccagccctcaccttcaaagaaggattatatggtcatgcgcaccaaggcatctccaggaatcagaacggttcatgagttttctaaaaagtatttattatggaaaatttcagatgcacacaaaactagaaagaatagcataataaaccaccatgtacccagctacagcatgtattaacccatagacacgtttattttatctgtatcttcatgcattctccacgccccactcttcatacataaaggatcattttgaatcaaatcccacatctcacatcatttcacttgtaaatatttcagtaggtagctctgaaagataaaaattaaaaacatacaatgccatacgtgcatctacaaaattaaataatttattagtataatcccatccactgtttagatttctctgattttattataatttttaaaaatggttggtttgttgcaatcaagatgcaagcaaaatccacgtatggggtttggttaatatgtctctttagtcttttttagtctaaaggcttcttctctcgcttattttcttcctcttgccatttatttgttgttgtgttttcacttgcgattattgtcctatatctagagttagccacattctagggtttgccagttgcaaccttgggatgtcattctacccagaggctgattctttggtgcctttgttccagtgtagacatgcagcatgcaagcaggagggggctcaatgaaagagcagtaggtcatcttttccaaccttgccacatcagtgccctgaccagccacaccactaaagtgctctggtgaatttcttttccaacaccctaatgctgaggctttccagccatccacccatccatccatcactcatttccttggccatccaccacccattaaatgtgaggatactatggcccaggcactgagcctagtgctgaggatacagggctgaatcagacccagccttgatcctcagggtggtcagggccagtgcaaaaacaagcaaggagataaaatatgctggtactaggctttcctgctgcattctcattgcagacttgcgtgaaagggagcttacagcaggagtcccactggacattagaaaaagcttccaaaggccaggtgtggtggcttatgcctgtaatcccagcactttgggagaccgaggcaggcggatcacctgaggtcaggagtttgagaccagcctgaccaacatggagaaaccccatctctactaaaaatacaaaattagtcgggcgtggtggtgcatgcctgaaatcccagctcctcgggaggctgaggcaggagaatcgcttgaacccaggaggtggaggttgcagtgagctgagactgtgccaccagactctagcctggacaacaagagtgaaactccgtctcaaaaaataaaaaaataaaagaagaagaagaagaagaaaagaaaaagcttccaaagtggctcctgaaatgtctgtcacaggactcagccaggcaagggggagggagtgaagggtgaggaggaaagagaggacattcagaacaggcgaactgcaggtgcaaaggcccggaatctagggaaagcagagtctgtgggaggaacagccagtgtttcaggatggctaaagcagaggttgtgaagggcagggacgactttagaccttagaggccccaggcactgttattttccaaggccccacccccacactataccatgcttattaaaattcacccacatcacacaggaaatatgagttatatatggctacctaaggttgaggccagttgcaaagacaattgacatgttacattttgtagacatttaattacatatttatcaattacaacttgacggctttcttgttttatcagttttggaggatgtacataaatatatagaatgagagtctcaaaactaatcttgtagctacgcctgtgatgggctaattgatgaatcagtgctggagaatgggtcacagtggcaaatgaggctggagaggcccgtgagctgctgtcccagagggcctgggatgtcctgcagggagcttggcatgagaaaccttggagagttttaagcaagggctgatgtgggctgcctagaaaggcatggatgagagaagcctggagacagggatcccagggaaacgcccatgcaattagtctatttctgctgcaagtaagcatgcatttgtaggcttgatgctttttttctgcttctccagccctggcctgggtcaatccttggggcccagactgagcacgtgatggcagaggaaaggaagccctgcttcctccagagggcgtcgcaggacagcttttcctagacaggggctagtatgtgcagctcctgcaccgggatactggttgacaagtttggctgggctggaagccagcacctagggaggtccctggaaggggccagcctcaccaggagaggagggacctggcccttcagggtcgagctcaacagaggaaaagatctcagggcacccagagcccagtggctttcagcacctgcatgaaaatcagagatcaaccagattaccccatattgcccaagagaaaactgaggccagaaagtgatggagcttgcccaggaccccagagggtgttagaggcaggccagaaccagaggacagctctgtcccagcacttgccctcctttaattaggtgggtggtcatatcgcagtggtcagagacattgcaaacaataataataaatattgagcacttgttacacgcagggcactatgctaagcaccttgtatttgttatgtcctttcatcctagcaacttctctggaagtggagtaatatctcccccatgtcctacataagacaatggatacactggagggttaaagccatgccttgcctaaagttacacagctgtgcttaacagctggaaaaccccaaagggtccctctgactcagcccctgtgtgctcagttttaattttgggagggaaataacaatgccaccttataatactttctaagaatgagaattttgttcagtgaagtggccttctagagctggaaaatgaattcatatactcttcatatttttaacaaggatgtcgtagttaattgatccgtagccaggaagttagattaaccaggacacttctggccccaagcactctagctagttgattaatggagacattgccatgccagctaagtggctttggagtgcaaaataggatgaattgctcttagcagagacctaaatcctaaactcaaatcctcacatttgggcaggtgatcaatgcttagggagcatctcctgcccaaatgcgaggatttgagagggacagtcgcctatacaggttcacagaactgactggcaggaccaagacgagtcctcttgtatccgaagcccaaacccttaatcttgaagctcagtagcaaaccaacaaaagactgttgcagtcaggcgtacgccacgtttacttttccattgccaggactggtaagccgaaaaggcaccacagaggatccatgagaacgggtacgtaaagcatacagattagaattttggctttgtcacaaaggcacttgaaggagtcaaccccttggaggagactttcaacattcattcaacaaatatttactatgagcactggggagcccacagtgaacaggatgttcaaggcctgggctctcaaggattttacattctaaggacgaagaaagtggggctgggtggggacggggagagacaagaaatataaagagactgttaagtgctattagggcaataaaactggataatatgacaaaacagggatggagtgggactgtttagttagtagccaggtatgagaaatttgagttgagatctgcatgatacgaaagaaggaagctggttgggtgcagtggctcatgcctacaaccctaacactttgggagaacgaagcaggtggctcacttgagctcaagagtttgagaccagcctgggcaacatggcaatatcctgtccctacaaaaaaatacaaaaaaatagctgggcgtggtggcaggtacccatagtcgcagctactcaggaggctgaggtgggaggatcacctgagcatggggattcgaggctgcagtgagccatgattgcaccactgcacttccagcttgggcaacagagtgagaccatgtctcacaaaaaaggaaagaaagaaaaaagaaagtcatgctgaaagaaaagcattgcgcgcagagagaaaaacaactgcaaaggccctgaggcaggaatgaagcctggcccattggagaacgtctggaatagctctgtctaacaaatacagtgtgagtcatgggcatcattttaaattttctagcagcacattttaaaaacaaaaagaaactggtaaaattaattttaatatgtttaattttttattttattattattattattattattattattttttgagacggagtcttgctttgttgcccaggctggagtacagtggcatgatctgggctcactgcaacctccgcctcccaggttcaagtgattctcctgcctcagcctcctga

SEQ ID NO: 889 - DNA, 23 bp, Synthetic construct
  source 1..23: mol_type = other DNA
gttgatgtgatgggagcccttct

SEQ ID NO: 890 - DNA, 23 bp, Synthetic construct
  source 1..23: mol_type = other DNA
gtggcgcattgccacgaagcagg

SEQ ID NO: 891 - DNA, 23 bp, Synthetic construct
  source 1..23: mol_type = other DNA
gaggacaaagtacaaacggcaga

SEQ ID NO: 892 - DNA, 23 bp, Synthetic construct
  source 1..23: mol_type = other DNA
ggtgaaggtgtggttccagaacc

SEQ ID NO: 893 - DNA, 23 bp, Synthetic construct
  source 1..23: mol_type = other DNA
gagggttctagacccagaggctc

SEQ ID NO: 894 - DNA, 23 bp, Synthetic construct
  source 1..23: mol_type = other DNA
gaggctcaagtgagcagctgagg

SEQ ID NO: 895 - DNA, 23 bp, Synthetic construct
  source 1..23: mol_type = other DNA
tgtaaaggaaactggaacacaaa

SEQ ID NO: 896 - DNA, 23 bp, Synthetic construct
  source 1..23: mol_type = other DNA
ggcgcacggtggcggggtcccag

SEQ ID NO: 897 - DNA, 23 bp, Synthetic construct
  source 1..23: mol_type = other DNA
tacttccgctttcaccttggaga

SEQ ID NO: 898 - DNA, 23 bp, Synthetic construct
  source 1..23: mol_type = other DNA
agatgactgccaaggggcatatg

SEQ ID NO: 899 - DNA, 23 bp, Synthetic construct
  source 1..23: mol_type = other DNA
gcccctgtctaggaaaagctgtc

SEQ ID NO: 900 - DNA, 23 bp, Synthetic construct
  source 1..23: mol_type = other DNA
cctacgtcagcacctgggacccc

SEQ ID NO: 901 - DNA, 23 bp, Synthetic construct
  source 1..23: mol_type = other DNA
caggacagcttttcctagacagg

SEQ ID NO: 902 - DNA, 23 bp, Synthetic construct
  source 1..23: mol_type = other DNA
ccgtctccaaggtgaaagcggaa

SEQ ID NO: 903 - DNA, 23 bp, Synthetic construct
  source 1..23: mol_type = other DNA
gcatggccccattcgcacggctc

SEQ ID NO: 904 - DNA, 23 bp, Synthetic construct
  source 1..23: mol_type = other DNA
gcagcttcctcctcctttatttt

SEQ ID NO: 905 - DNA, 23 bp, Synthetic construct
  source 1..23: mol_type = other DNA
ggcctcctccttcctagtctcct

SEQ ID NO: 906 - DNA, 23 bp, Synthetic construct
  source 1..23: mol_type = other DNA
tattcccagggccggttaatgtg

SEQ ID NO: 907 - DNA, 23 bp, Synthetic construct
  source 1..23: mol_type = other DNA
accaaagcgccgatggatgtggc

SEQ ID NO: 908 - DNA, 23 bp, Synthetic construct
  source 1..23: mol_type = other DNA
tttgtactttgtcctccggttct

SEQ ID NO: 909 - DNA, 23 bp, Synthetic construct
  source 1..23: mol_type = other DNA
tttccctcactcctgctcggtga

SEQ ID NO: 910 - DNA, 23 bp, Synthetic construct
  source 1..23: mol_type = other DNA
ccgagcaggagtgagggaaacgg

SEQ ID NO: 911 - DNA, 23 bp, Synthetic construct
  source 1..23: mol_type = other DNA
ccttggagacggcgactctctgc

SEQ ID NO: 912 - DNA, 23 bp, Synthetic construct
  source 1..23: mol_type = other DNA
ggctggcccgccccgcagtctat

SEQ ID NO: 913 - DNA, 23 bp, Synthetic construct
  source 1..23: mol_type = other DNA
tccaccccacagtggggccacta

SEQ ID NO: 914 - DNA, 23 bp, Synthetic construct
  source 1..23: mol_type = other DNA
acagtggggccactagggacagg

SEQ ID NO: 915 - DNA, 23 bp, Synthetic construct
  source 1..23: mol_type = other DNA
agagggttctagacccagaggct

SEQ ID NO: 916 - DNA, 23 bp, Synthetic construct
  source 1..23: mol_type = other DNA
cctcactcctgctcggtgaattt

SEQ ID NO: 917 - DNA, 23 bp, Synthetic construct
  source 1..23: mol_type = other DNA
ctgatggtccatgtctgttactc

SEQ ID NO: 918 - DNA, 2689 bp, Synthetic construct
  source 1..2689: mol_type = other DNA
gacgaaagggcctcgtgatacgcctatttttataggttaatgtcatgataataatggtttcttagacgtcaggtggcacttttcggggaaatgtgcgcggaacccctatttgtttatttttctaaatacattcaaatatgtatccgctcatgagacaataaccctgataaatgcttcaataatattgaaaaaggaagagtatgagtattcaacatttccgtgtcgcccttattcccttttttgcggcattttgccttcctgtttttgctcacccagaaacgctggtgaaagtaaaagatgctgaagatcagttgggtgcacgagtgggttacatcgaactggatctcaacagcggtaagatccttgagagttttcgccccgaagaacgttttccaatgatgagcacttttaaagttctgctatgtggcgcggtattatcccgtattgacgccgggcaagagcaactcggtcgccgcatacactattctcagaatgacttggttgagtactcaccagtcacagaaaagcatcttacggatggcatgacagtaagagaattatgcagtgctgccataaccatgagtgataacactgcggccaacttacttctgacaacgatcggaggaccgaaggagctaaccgcttttttgcacaacatgggggatcatgtaactcgccttgatcgttgggaaccggagctgaatgaagccataccaaacgacgagcgtgacaccacgatgcctgtagcaatggcaacaacgttgcgcaaactattaactggcgaactacttactctagcttcccggcaacaattaatagactggatggaggcggataaagttgcaggaccacttctgcgctcggcccttccggctggctggtttattgctgataaatctggagccggtgagcgtgggtctcgcggtatcattgcagcactggggccagatggtaagccctcccgtatcgtagttatctacacgacggggagtcaggcaactatggatgaacgaaatagacagatcgctgagataggtgcctcactgattaagcattggtaactgtcagaccaagtttactcatatatactttagattgatttaaaacttcatttttaatttaaaaggatctaggtgaagatcctttttgataatctcatgaccaaaatcccttaacgtgagttttcgttccactgagcgtcagaccccgtagaaaagatcaaaggatcttcttgagatcctttttttctgcgcgtaatctgctgcttgcaaacaaaaaaaccaccgctaccagcggtggtttgtttgccggatcaagagctaccaactctttttccgaaggtaactggcttcagcagagcgcagataccaaatactgttcttctagtgtagccgtagttaggccaccacttcaagaactctgtagcaccgcctacatacctcgctctgctaatcctgttaccagtggctgctgccagtggcgataagtcgtgtcttaccgggttggactcaagacgatagttaccggataaggcgcagcggtcgggctgaacggggggttcgtgcacacagcccagcttggagcgaacgacctacaccgaactgagatacctacagcgtgagctatgagaaagcgccacgcttcccgaagggagaaaggcggacaggtatccggtaagcggcagggtcggaacaggagagcgcacgagggagcttccagggggaaacgcctggtatctttatagtcctgtcgggtttcgccacctctgacttgagcgtcgatttttgtgatgctcgtcaggggggcggagcctatggaaaaacgccagcaacgcggcctttttacggttcctggccttttgctggccttttgctcacatgtgagggcctatttcccatgattccttcatatttgcatatacgatacaaggctgttagagagataattggaattaatttgactgtaaacacaaagatattagtacaaaatacgtgacgtagaaagtaataatttcttgggtagtttgcagttttaaaattatgttttaaaatggactatcatatgcttaccgtaacttgaaagtatttcgatttcttggctttatatatcttgtggaaaggacgaaacaccgaatttctactaagtgtagatgttgatgtgatgggagcccttcttttttttgttttagagctagaaatagcaagttaaaataaggctagtccgtttttagcgcgtgcgccaattctgcagacaaatggctctagatgcattcgcgaggtaccgagctcgaattcactggccgtcgttttacaacgtcgtgactgggaaaaccctggcgttacccaacttaatcgccttgcagcacatccccctttcgccagctggcgtaatagcgaagaggcccgcaccgatcgcccttcccaacagttgcgcagcctgaatggcgaatggcgcctgatgcggtattttctccttacgcatctgtgcggtatttcacaccgcatatggtgcactctcagtacaatctgctctgatgccgcatagttaagccagccccgacacccgccaacacccgctgacgcgccctgacgggcttgtctgctcccggcatccgcttacagacaagctgtgaccgtctccgggagctgcatgtgtcagaggttttcaccgtcatcaccgaaacgcgcga

SEQ ID NO: 919 - DNA, 2689 bp, Synthetic construct
  source 1..2689: mol_type = other DNA
gacgaaagggcctcgtgatacgcctatttttataggttaatgtcatgataataatggtttcttagacgtcaggtggcacttttcggggaaatgtgcgcggaacccctatttgtttatttttctaaatacattcaaatatgtatccgctcatgagacaataaccctgataaatgcttcaataatattgaaaaaggaagagtatgagtattcaacatttccgtgtcgcccttattcccttttttgcggcattttgccttcctgtttttgctcacccagaaacgctggtgaaagtaaaagatgctgaagatcagttgggtgcacgagtgggttacatcgaactggatctcaacagcggtaagatccttgagagttttcgccccgaagaacgttttccaatgatgagcacttttaaagttctgctatgtggcgcggtattatcccgtattgacgccgggcaagagcaactcggtcgccgcatacactattctcagaatgacttggttgagtactcaccagtcacagaaaagcatcttacggatggcatgacagtaagagaattatgcagtgctgccataaccatgagtgataacactgcggccaacttacttctgacaacgatcggaggaccgaaggagctaaccgcttttttgcacaacatgggggatcatgtaactcgccttgatcgttgggaaccggagctgaatgaagccataccaaacgacgagcgtgacaccacgatgcctgtagcaatggcaacaacgttgcgcaaactattaactggcgaactacttactctagcttcccggcaacaattaatagactggatggaggcggataaagttgcaggaccacttctgcgctcggcccttccggctggctggtttattgctgataaatctggagccggtgagcgtgggtctcgcggtatcattgcagcactggggccagatggtaagccctcccgtatcgtagttatctacacgacggggagtcaggcaactatggatgaacgaaatagacagatcgctgagataggtgcctcactgattaagcattggtaactgtcagaccaagtttactcatatatactttagattgatttaaaacttcatttttaatttaaaaggatctaggtgaagatcctttttgataatctcatgaccaaaatcccttaacgtgagttttcgttccactgagcgtcagaccccgtagaaaagatcaaaggatcttcttgagatcctttttttctgcgcgtaatctgctgcttgcaaacaaaaaaaccaccgctaccagcggtggtttgtttgccggatcaagagctaccaactctttttccgaaggtaactggcttcagcagagcgcagataccaaatactgttcttctagtgtagccgtagttaggccaccacttcaagaactctgtagcaccgcctacatacctcgctctgctaatcctgttaccagtggctgctgccagtggcgataagtcgtgtcttaccgggttggactcaagacgatagttaccggataaggcgcagcggtcgggctgaacggggggttcgtgcacacagcccagcttggagcgaacgacctacaccgaactgagatacctacagcgtgagctatgagaaagcgccacgcttcccgaagggagaaaggcggacaggtatccggtaagcggcagggtcggaacaggagagcgcacgagggagcttccagggggaaacgcctggtatctttatagtcctgtcgggtttcgccacctctgacttgagcgtcgatttttgtgatgctcgtcaggggggcggagcctatggaaaaacgccagcaacgcggcctttttacggttcctggccttttgctggccttttgctcacatgtgagggcctatttcccatgattccttcatatttgcatatacgatacaaggctgttagagagataattggaattaatttgactgtaaacacaaagatattagtacaaaatacgtgacgtagaaagtaataatttcttgggtagtttgcagttttaaaattatgttttaaaatggactatcatatgcttaccgtaacttgaaagtatttcgatttcttggctttatatatcttgtggaaaggacgaaacaccgaatttctactaagtgtagatgtggcgcattgccacgaagcaggtttttttgttttagagctagaaatagcaagttaaaataaggctagtccgtttttagcgcgtgcgccaattctgcagacaaatggctctagatgcattcgcgaggtaccgagctcgaattcactggccgtcgttttacaacgtcgtgactgggaaaaccctggcgttacccaacttaatcgccttgcagcacatccccctttcgccagctggcgtaatagcgaagaggcccgcaccgatcgcccttcccaacagttgcgcagcctgaatggcgaatggcgcctgatgcggtattttctccttacgcatctgtgcggtatttcacaccgcatatggtgcactctcagtacaatctgctctgatgccgcatagttaagccagccccgacacccgccaacacccgctgacgcgccctgacgggcttgtctgctcccggcatccgcttacagacaagctgtgaccgtctccgggagctgcatgtgtcagaggttttcaccgtcatcaccgaaacgcgcga

SEQ ID NO: 920 - DNA, 2689 bp, Synthetic construct
  source 1..2689: mol_type = other DNA
gacgaaagggcctcgtgatacgcctatttttataggttaatgtcatgataataatggtttcttagacgtcaggtggcacttttcggggaaatgtgcgcggaacccctatttgtttatttttctaaatacattcaaatatgtatccgctcatgagacaataaccctgataaatgcttcaataatattgaaaaaggaagagtatgagtattcaacatttccgtgtcgcccttattcccttttttgcggcattttgccttcctgtttttgctcacccagaaacgctggtgaaagtaaaagatgctgaagatcagttgggtgcacgagtgggttacatcgaactggatctcaacagcggtaagatccttgagagttttcgccccgaagaacgttttccaatgatgagcacttttaaagttctgctatgtggcgcggtattatcccgtattgacgccgggcaagagcaactcggtcgccgcatacactattctcagaatgacttggttgagtactcaccagtcacagaaaagcatcttacggatggcatgacagtaagagaattatgcagtgctgccataaccatgagtgataacactgcggccaacttacttctgacaacgatcggaggaccgaaggagctaaccgcttttttgcacaacatgggggatcatgtaactcgccttgatcgttgggaaccggagctgaatgaagccataccaaacgacgagcgtgacaccacgatgcctgtagcaatggcaacaacgttgcgcaaactattaactggcgaactacttactctagcttcccggcaacaattaatagactggatggaggcggataaagttgcaggaccacttctgcgctcggcccttccggctggctggtttattgctgataaatctggagccggtgagcgtgggtctcgcggtatcattgcagcactggggccagatggtaagccctcccgtatcgtagttatctacacgacggggagtcaggcaactatggatgaacgaaatagacagatcgctgagataggtgcctcactgattaagcattggtaactgtcagaccaagtttactcatatatactttagattgatttaaaacttcatttttaatttaaaaggatctaggtgaagatcctttttgataatctcatgaccaaaatcccttaacgtgagttttcgttccactgagcgtcagaccccgtagaaaagatcaaaggatcttcttgagatcctttttttctgcgcgtaatctgctgcttgcaaacaaaaaaaccaccgctaccagcggtggtttgtttgccggatcaagagctaccaactctttttccgaaggtaactggcttcagcagagcgcagataccaaatactgttcttctagtgtagccgtagttaggccaccacttcaagaactctgtagcaccgcctacatacctcgctctgctaatcctgttaccagtggctgctgccagtggcgataagtcgtgtcttaccgggttggactcaagacgatagttaccggataaggcgcagcggtcgggctgaacggggggttcgtgcacacagcccagcttggagcgaacgacctacaccgaactgagatacctacagcgtgagctatgagaaagcgccacgcttcccgaagggagaaaggcggacaggtatccggtaagcggcagggtcggaacaggagagcgcacgagggagcttccagggggaaacgcctggtatctttatagtcctgtcgggtttcgccacctctgacttgagcgtcgatttttgtgatgctcgtcaggggggcggagcctatggaaaaacgccagcaacgcggcctttttacggttcctggccttttgctggccttttgctcacatgtgagggcctatttcccatgattccttcatatttgcatatacgatacaaggctgttagagagataattggaattaatttgactgtaaacacaaagatattagtacaaaatacgtgacgtagaaagtaataatttcttgggtagtttgcagttttaaaattatgttttaaaatggactatcatatgcttaccgtaacttgaaagtatttcgatttcttggctttatatatcttgtggaaaggacgaaacaccgaatttctactaagtgtagatgaggacaaagtacaaacggcagatttttttgttttagagctagaaatagcaagttaaaataaggctagtccgtttttagcgcgtgcgccaattctgcagacaaatggctctagatgcattcgcgaggtaccgagctcgaattcactggccgtcgttttacaacgtcgtgactgggaaaaccctggcgttacccaacttaatcgccttgcagcacatccccctttcgccagctggcgtaatagcgaagaggcccgcaccgatcgcccttcccaacagttgcgcagcctgaatggcgaatggcgcctgatgcggtattttctccttacgcatctgtgcggtatttcacaccgcatatggtgcactctcagtacaatctgctctgatgccgcatagttaagccagccccgacacccgccaacacccgctgacgcgccctgacgggcttgtctgctcccggcatccgcttacagacaagctgtgaccgtctccgggagctgcatgtgtcagaggttttcaccgtcatcaccgaaacgcgcga

SEQ ID NO: 921 - DNA, 2689 bp, Synthetic construct
  source 1..2689: mol_type = other DNA
gacgaaagggcctcgtgatacgcctatttttataggttaatgtcatgataataatggtttcttagacgtcaggtggcacttttcggggaaatgtgcgcggaacccctatttgtttatttttctaaatacattcaaatatgtatccgctcatgagacaataaccctgataaatgcttcaataatattgaaaaaggaagagtatgagtattcaacatttccgtgtcgcccttattcccttttttgcggcattttgccttcctgtttttgctcacccagaaacgctggtgaaagtaaaagatgctgaagatcagttgggtgcacgagtgggttacatcgaactggatctcaacagcggtaagatccttgagagttttcgccccgaagaacgttttccaatgatgagcacttttaaagttctgctatgtggcgcggtattatcccgtattgacgccgggcaagagcaactcggtcgccgcatacactattctcagaatgacttggttgagtactcaccagtcacagaaaagcatcttacggatggcatgacagtaagagaattatgcagtgctgccataaccatgagtgataacactgcggccaacttacttctgacaacgatcggaggaccgaaggagctaaccgcttttttgcacaacatgggggatcatgtaactcgccttgatcgttgggaaccggagctgaatgaagccataccaaacgacgagcgtgacaccacgatgcctgtagcaatggcaacaacgttgcgcaaactattaactggcgaactacttactctagcttcccggcaacaattaatagactggatggaggcggataaagttgcaggaccacttctgcgctcggcccttccggctggctggtttattgctgataaatctggagccggtgagcgtgggtctcgcggtatcattgcagcactggggccagatggtaagccctcccgtatcgtagttatctacacgacggggagtcaggcaactatggatgaacgaaatagacagatcgctgagataggtgcctcactgattaagcattggtaactgtcagaccaagtttactcatatatactttagattgatttaaaacttcatttttaatttaaaaggatctaggtgaagatcctttttgataatctcatgaccaaaatcccttaacgtgagttttcgttccactgagcgtcagaccccgtagaaaagatcaaaggatcttcttgagatcctttttttctgcgcgtaatctgctgcttgcaaacaaaaaaaccaccgctaccagcggtggtttgtttgccggatcaagagctaccaactctttttccgaaggtaactggcttcagcagagcgcagataccaaatactgttcttctagtgtagccgtagttaggccaccacttcaagaactctgtagcaccgcctacatacctcgctctgctaatcctgttaccagtggctgctgccagtggcgataagtcgtgtcttaccgggttggactcaagacgatagttaccggataaggcgcagcggtcgggctgaacggggggttcgtgcacacagcccagcttggagcgaacgacctacaccgaactgagatacctacagcgtgagctatgagaaagcgccacgcttcccgaagggagaaaggcggacaggtatccggtaagcggcagggtcggaacaggagagcgcacgagggagcttccagggggaaacgcctggtatctttatagtcctgtcgggtttcgccacctctgacttgagcgtcgatttttgtgatgctcgtcaggggggcggagcctatggaaaaacgccagcaacgcggcctttttacggttcctggccttttgctggccttttgctcacatgtgagggcctatttcccatgattccttcatatttgcatatacgatacaaggctgttagagagataattggaattaatttgactgtaaacacaaagatattagtacaaaatacgtgacgtagaaagtaataatttcttgggtagtttgcagttttaaaattatgttttaaaatggactatcatatgcttaccgtaacttgaaagtatttcgatttcttggctttatatatcttgtggaaaggacgaaacaccgaatttctactaagtgtagatggtgaaggtgtggttccagaacctttttttgttttagagctagaaatagcaagttaaaataaggctagtccgtttttagcgcgtgcgccaattctgcagacaaatggctctagatgcattcgcgaggtaccgagctcgaattcactggccgtcgttttacaacgtcgtgactgggaaaaccctggcgttacccaacttaatcgccttgcagcacatccccctttcgccagctggcgtaatagcgaagaggcccgcaccgatcgcccttcccaacagttgcgcagcctgaatggcgaatggcgcctgatgcggtattttctccttacgcatctgtgcggtatttcacaccgcatatggtgcactctcagtacaatctgctctgatgccgcatagttaagccagccccgacacccgccaacacccgctgacgcgccctgacgggcttgtctgctcccggcatccgcttacagacaagctgtgaccgtctccgggagctgcatgtgtcagaggttttcaccgtcatcaccgaaacgcgcga

SEQ ID NO: 922 - DNA, 2689 bp, Synthetic construct
  source 1..2689: mol_type = other DNA
gacgaaagggcctcgtgatacgcctatttttataggttaatgtcatgataataatggtttcttagacgtcaggtggcacttttcggggaaatgtgcgcggaacccctatttgtttatttttctaaatacattcaaatatgtatccgctcatgagacaataaccctgataaatgcttcaataatattgaaaaaggaagagtatgagtattcaacatttccgtgtcgcccttattcccttttttgcggcattttgccttcctgtttttgctcacccagaaacgctggtgaaagtaaaagatgctgaagatcagttgggtgcacgagtgggttacatcgaactggatctcaacagcggtaagatccttgagagttttcgccccgaagaacgttttccaatgatgagcacttttaaagttctgctatgtggcgcggtattatcccgtattgacgccgggcaagagcaactcggtcgccgcatacactattctcagaatgacttggttgagtactcaccagtcacagaaaagcatcttacggatggcatgacagtaagagaattatgcagtgctgccataaccatgagtgataacactgcggccaacttacttctgacaacgatcggaggaccgaaggagctaaccgcttttttgcacaacatgggggatcatgtaactcgccttgatcgttgggaaccggagctgaatgaagccataccaaacgacgagcgtgacaccacgatgcctgtagcaatggcaacaacgttgcgcaaactattaactggcgaactacttactctagcttcccggcaacaattaatagactggatggaggcggataaagttgcaggaccacttctgcgctcggcccttccggctggctggtttattgctgataaatctggagccggtgagcgtgggtctcgcggtatcattgcagcactggggccagatggtaagccctcccgtatcgtagttatctacacgacggggagtcaggcaactatggatgaacgaaatagacagatcgctgagataggtgcctcactgattaagcattggtaactgtcagaccaagtttactcatatatactttagattgatttaaaacttcatttttaatttaaaaggatctaggtgaagatcctttttgataatctcatgaccaaaatcccttaacgtgagttttcgttccactgagcgtcagaccccgtagaaaagatcaaaggatcttcttgagatcctttttttctgcgcgtaatctgctgcttgcaaacaaaaaaaccaccgctaccagcggtggtttgtttgccggatcaagagctaccaactctttttccgaaggtaactggcttcagcagagcgcagataccaaatactgttcttctagtgtagccgtagttaggccaccacttcaagaactctgtagcaccgcctacatacctcgctctgctaatcctgttaccagtggctgctgccagtggcgataagtcgtgtcttaccgggttggactcaagacgatagttaccggataaggcgcagcggtcgggctgaacggggggttcgtgcacacagcccagcttggagcgaacgacctacaccgaactgagatacctacagcgtgagctatgagaaagcgccacgcttcccgaagggagaaaggcggacaggtatccggtaagcggcagggtcggaacaggagagcgcacgagggagcttccagggggaaacgcctggtatctttatagtcctgtcgggtttcgccacctctgacttgagcgtcgatttttgtgatgctcgtcaggggggcggagcctatggaaaaacgccagcaacgcggcctttttacggttcctggccttttgctggccttttgctcacatgtgagggcctatttcccatgattccttcatatttgcatatacgatacaaggctgttagagagataattggaattaatttgactgtaaacacaaagatattagtacaaaatacgtgacgtagaaagtaataatttcttgggtagtttgcagttttaaaattatgttttaaaatggactatcatatgcttaccgtaacttgaaagtatttcgatttcttggctttatatatcttgtggaaaggacgaaacaccgaatttctactaagtgtagatgagggttctagacccagaggctctttttttgttttagagctagaaatagcaagttaaaataaggctagtccgtttttagcgcgtgcgccaattctgcagacaaatggctctagatgcattcgcgaggtaccgagctcgaattcactggccgtcgttttacaacgtcgtgactgggaaaaccctggcgttacccaacttaatcgccttgcagcacatccccctttcgccagctggcgtaatagcgaagaggcccgcaccgatcgcccttcccaacagttgcgcagcctgaatggcgaatggcgcctgatgcggtattttctccttacgcatctgtgcggtatttcacaccgcatatggtgcactctcagtacaatctgctctgatgccgcatagttaagccagccccgacacccgccaacacccgctgacgcgccctgacgggcttgtctgctcccggcatccgcttacagacaagctgtgaccgtctccgggagctgcatgtgtcagaggttttcaccgtcatcaccgaaacgcgcga

SEQ ID NO: 923 - DNA, 2689 bp, Synthetic construct
  source 1..2689: mol_type = other DNA
gacgaaagggcctcgtgatacgcctatttttataggttaatgtcatgataataatggtttcttagacgtcaggtggcacttttcggggaaatgtgcgcggaacccctatttgtttatttttctaaatacattcaaatatgtatccgctcatgagacaataaccctgataaatgcttcaataatattgaaaaaggaagagtatgagtattcaacatttccgtgtcgcccttattcccttttttgcggcattttgccttcctgtttttgctcacccagaaacgctggtgaaagtaaaagatgctgaagatcagttgggtgcacgagtgggttacatcgaactggatctcaacagcggtaagatccttgagagttttcgccccgaagaacgttttccaatgatgagcacttttaaagttctgctatgtggcgcggtattatcccgtattgacgccgggcaagagcaactcggtcgccgcatacactattctcagaatgacttggttgagtactcaccagtcacagaaaagcatcttacggatggcatgacagtaagagaattatgcagtgctgccataaccatgagtgataacactgcggccaacttacttctgacaacgatcggaggaccgaaggagctaaccgcttttttgcacaacatgggggatcatgtaactcgccttgatcgttgggaaccggagctgaatgaagccataccaaacgacgagcgtgacaccacgatgcctgtagcaatggcaacaacgttgcgcaaactattaactggcgaactacttactctagcttcccggcaacaattaatagactggatggaggcggataaagttgcaggaccacttctgcgctcggcccttccggctggctggtttattgctgataaatctggagccggtgagcgtgggtctcgcggtatcattgcagcactggggccagatggtaagccctcccgtatcgtagttatctacacgacggggagtcaggcaactatggatgaacgaaatagacagatcgctgagataggtgcctcactgattaagcattggtaactgtcagaccaagtttactcatatatactttagattgatttaaaacttcatttttaatttaaaaggatctaggtgaagatcctttttgataatctcatgaccaaaatcccttaacgtgagttttcgttccactgagcgtcagaccccgtagaaaagatcaaaggatcttcttgagatcctttttttctgcgcgtaatctgctgcttgcaaacaaaaaaaccaccgctaccagcggtggtttgtttgccggatcaagagctaccaactctttttccgaaggtaactggcttcagcagagcgcagataccaaatactgttcttctagtgtagccgtagttaggccaccacttcaagaactctgtagcaccgcctacatacctcgctctgctaatcctgttaccagtggctgctgccagtggcgataagtcgtgtcttaccgggttggactcaagacgatagttaccggataaggcgcagcggtcgggctgaacggggggttcgtgcacacagcccagcttggagcgaacgacctacaccgaactgagatacctacagcgtgagctatgagaaagcgccacgcttcccgaagggagaaaggcggacaggtatccggtaagcggcagggtcggaacaggagagcgcacgagggagcttccagggggaaacgcctggtatctttatagtcctgtcgggtttcgccacctctgacttgagcgtcgatttttgtgatgctcgtcaggggggcggagcctatggaaaaacgccagcaacgcggcctttttacggttcctggccttttgctggccttttgctcacatgtgagggcctatttcccatgattccttcatatttgcatatacgatacaaggctgttagagagataattggaattaatttgactgtaaacacaaagatattagtacaaaatacgtgacgtagaaagtaataatttcttgggtagtttgcagttttaaaattatgttttaaaatggactatcatatgcttaccgtaacttgaaagtatttcgatttcttggctttatatatcttgtggaaaggacgaaacaccgaatttctactaagtgtagatgaggctcaagtgagcagctgaggtttttttgttttagagctagaaatagcaagttaaaataaggctagtccgtttttagcgcgtgcgccaattctgcagacaaatggctctagatgcattcgcgaggtaccgagctcgaattcactggccgtcgttttacaacgtcgtgactgggaaaaccctggcgttacccaacttaatcgccttgcagcacatccccctttcgccagctggcgtaatagcgaagaggcccgcaccgatcgcccttcccaacagttgcgcagcctgaatggcgaatggcgcctgatgcggtattttctccttacgcatctgtgcggtatttcacaccgcatatggtgcactctcagtacaatctgctctgatgccgcatagttaagccagccccgacacccgccaacacccgctgacgcgccctgacgggcttgtctgctcccggcatccgcttacagacaagctgtgaccgtctccgggagctgcatgtgtcagaggttttcaccgtcatcaccgaaacgcgcga

SEQ ID NO: 924 - DNA, 2689 bp, Synthetic construct
  source 1..2689: mol_type = other DNA
gacgaaagggcctcgtgatacgcctatttttataggttaatgtcatgataataatggtttcttagacgtcaggtggcacttttcggggaaatgtgcgcggaacccctatttgtttatttttctaaatacattcaaatatgtatccgctcatgagacaataaccctgataaatgcttcaataatattgaaaaaggaagagtatgagtattcaacatttccgtgtcgcccttattcccttttttgcggcattttgccttcctgtttttgctcacccagaaacgctggtgaaagtaaaagatgctgaagatcagttgggtgcacgagtgggttacatcgaactggatctcaacagcggtaagatccttgagagttttcgccccgaagaacgttttccaatgatgagcacttttaaagttctgctatgtggcgcggtattatcccgtattgacgccgggcaagagcaactcggtcgccgcatacactattctcagaatgacttggttgagtactcaccagtcacagaaaagcatcttacggatggcatgacagtaagagaattatgcagtgctgccataaccatgagtgataacactgcggccaacttacttctgacaacgatcggaggaccgaaggagctaaccgcttttttgcacaacatgggggatcatgtaactcgccttgatcgttgggaaccggagctgaatgaagccataccaaacgacgagcgtgacaccacgatgcctgtagcaatggcaacaacgttgcgcaaactattaactggcgaactacttactctagcttcccggcaacaattaatagactggatggaggcggataaagttgcaggaccacttctgcgctcggcccttccggctggctggtttattgctgataaatctggagccggtgagcgtgggtctcgcggtatcattgcagcactggggccagatggtaagccctcccgtatcgtagttatctacacgacggggagtcaggcaactatggatgaacgaaatagacagatcgctgagataggtgcctcactgattaagcattggtaactgtcagaccaagtttactcatatatactttagattgatttaaaacttcatttttaatttaaaaggatctaggtgaagatcctttttgataatctcatgaccaaaatcccttaacgtgagttttcgttccactgagcgtcagaccccgtagaaaagatcaaaggatcttcttgagatcctttttttctgcgcgtaatctgctgcttgcaaacaaaaaaaccaccgctaccagcggtggtttgtttgccggatcaagagctaccaactctttttccgaaggtaactggcttcagcagagcgcagataccaaatactgttcttctagtgtagccgtagttaggccaccacttcaagaactctgtagcaccgcctacatacctcgctctgctaatcctgttaccagtggctgctgccagtggcgataagtcgtgtcttaccgggttggactcaagacgatagttaccggataaggcgcagcggtcgggctgaacggggggttcgtgcacacagcccagcttggagcgaacgacctacaccgaactgagatacctacagcgtgagctatgagaaagcgccacgcttcccgaagggagaaaggcggacaggtatccggtaagcggcagggtcggaacaggagagcgcacgagggagcttccagggggaaacgcctggtatctttatagtcctgtcgggtttcgccacctctgacttgagcgtcgatttttgtgatgctcgtcaggggggcggagcctatggaaaaacgccagcaacgcggcctttttacggttcctggccttttgctggccttttgctcacatgtgagggcctatttcccatgattccttcatatttgcatatacgatacaaggctgttagagagataattggaattaatttgactgtaaacacaaagatattagtacaaaatacgtgacgtagaaagtaataatttcttgggtagtttgcagttttaaaattatgttttaaaatggactatcatatgcttaccgtaacttgaaagtatttcgatttcttggctttatatatcttgtggaaaggacgaaacaccgaatttctactaagtgtagattgtaaaggaaactggaacacaaatttttttgttttagagctagaaatagcaagttaaaataaggctagtccgtttttagcgcgtgcgccaattctgcagacaaatggctctagatgcattcgcgaggtaccgagctcgaattcactggccgtcgttttacaacgtcgtgactgggaaaaccctggcgttacccaacttaatcgccttgcagcacatccccctttcgccagctggcgtaatagcgaagaggcccgcaccgatcgcccttcccaacagttgcgcagcctgaatggcgaatggcgcctgatgcggtattttctccttacgcatctgtgcggtatttcacaccgcatatggtgcactctcagtacaatctgctctgatgccgcatagttaagccagccccgacacccgccaacacccgctgacgcgccctgacgggcttgtctgctcccggcatccgcttacagacaagctgtgaccgtctccgggagctgcatgtgtcagaggttttcaccgtcatcaccgaaacgcgcga

SEQ ID NO: 925 - DNA, 2689 bp, Synthetic construct
  source 1..2689: mol_type = other DNA
gacgaaagggcctcgtgatacgcctatttttataggttaatgtcatgataataatggtttcttagacgtcaggtggcacttttcggggaaatgtgcgcggaacccctatttgtttatttttctaaatacattcaaatatgtatccgctcatgagacaataaccctgataaatgcttcaataatattgaaaaaggaagagtatgagtattcaacatttccgtgtcgcccttattcccttttttgcggcattttgccttcctgtttttgctcacccagaaacgctggtgaaagtaaaagatgctgaagatcagttgggtgcacgagtgggttacatcgaactggatctcaacagcggtaagatccttgagagttttcgccccgaagaacgttttccaatgatgagcacttttaaagttctgctatgtggcgcggtattatcccgtattgacgccgggcaagagcaactcggtcgccgcatacactattctcagaatgacttggttgagtactcaccagtcacagaaaagcatcttacggatggcatgacagtaagagaattatgcagtgctgccataaccatgagtgataacactgcggccaacttacttctgacaacgatcggaggaccgaaggagctaaccgcttttttgcacaacatgggggatcatgtaactcgccttgatcgttgggaaccggagctgaatgaagccataccaaacgacgagcgtgacaccacgatgcctgtagcaatggcaacaacgttgcgcaaactattaactggcgaactacttactctagcttcccggcaacaattaatagactggatggaggcggataaagttgcaggaccacttctgcgctcggcccttccggctggctggtttattgctgataaatctggagccggtgagcgtgggtctcgcggtatcattgcagcactggggccagatggtaagccctcccgtatcgtagttatctacacgacggggagtcaggcaactatggatgaacgaaatagacagatcgctgagataggtgcctcactgattaagcattggtaactgtcagaccaagtttactcatatatactttagattgatttaaaacttcatttttaatttaaaaggatctaggtgaagatcctttttgataatctcatgaccaaaatcccttaacgtgagttttcgttccactgagcgtcagaccccgtagaaaagatcaaaggatcttcttgagatcctttttttctgcgcgtaatctgctgcttgcaaacaaaaaaaccaccgctaccagcggtggtttgtttgccggatcaagagctaccaactctttttccgaaggtaactggcttcagcagagcgcagataccaaatactgttcttctagtgtagccgtagttaggccaccacttcaagaactctgtagcaccgcctacatacctcgctctgctaatcctgttaccagtggctgctgccagtggcgataagtcgtgtcttaccgggttggactcaagacgatagttaccggataaggcgcagcggtcgggctgaacggggggttcgtgcacacagcccagcttggagcgaacgacctacaccgaactgagatacctacagcgtgagctatgagaaagcgccacgcttcccgaagggagaaaggcggacaggtatccggtaagcggcagggtcggaacaggagagcgcacgagggagcttccagggggaaacgcctggtatctttatagtcctgtcgggtttcgccacctctgacttgagcgtcgatttttgtgatgctcgtcaggggggcggagcctatggaaaaacgccagcaacgcggcctttttacggttcctggccttttgctggccttttgctcacatgtgagggcctatttcccatgattccttcatatttgcatatacgatacaaggctgttagagagataattggaattaatttgactgtaaacacaaagatattagtacaaaatacgtgacgtagaaagtaataatttcttgggtagtttgcagttttaaaattatgttttaaaatggactatcatatgcttaccgtaacttgaaagtatttcgatttcttggctttatatatcttgtggaaaggacgaaacaccgaatttctactaagtgtagatggcgcacggtggcggggtcccagtttttttgttttagagctagaaatagcaagttaaaataaggctagtccgtttttagcgcgtgcgccaattctgcagacaaatggctctagatgcattcgcgaggtaccgagctcgaattcactggccgtcgttttacaacgtcgtgactgggaaaaccctggcgttacccaacttaatcgccttgcagcacatccccctttcgccagctggcgtaatagcgaagaggcccgcaccgatcgcccttcccaacagttgcgcagcctgaatggcgaatggcgcctgatgcggtattttctccttacgcatctgtgcggtatttcacaccgcatatggtgcactctcagtacaatctgctctgatgccgcatagttaagccagccccgacacccgccaacacccgctgacgcgccctgacgggcttgtctgctcccggcatccgcttacagacaagctgtgaccgtctccgggagctgcatgtgtcagaggttttcaccgtcatcaccgaaacgcgcga

SEQ ID NO: 926 - DNA, 2689 bp, Synthetic construct
  source 1..2689: mol_type = other DNA
gacgaaagggcctcgtgatacgcctatttttataggttaatgtcatgataataatggtttcttagacgtcaggtggcacttttcggggaaatgtgcgcggaacccctatttgtttatttttctaaatacattcaaatatgtatccgctcatgagacaataaccctgataaatgcttcaataatattgaaaaaggaagagtatgagtattcaacatttccgtgtcgcccttattcccttttttgcggcattttgccttcctgtttttgctcacccagaaacgctggtgaaagtaaaagatgctgaagatcagttgggtgcacgagtgggttacatcgaactggatctcaacagcggtaagatccttgagagttttcgccccgaagaacgttttccaatgatgagcacttttaaagttctgctatgtggcgcggtattatcccgtattgacgccgggcaagagcaactcggtcgccgcatacactattctcagaatgacttggttgagtactcaccagtcacagaaaagcatcttacggatggcatgacagtaagagaattatgcagtgctgccataaccatgagtgataacactgcggccaacttacttctgacaacgatcggaggaccgaaggagctaaccgcttttttgcacaacatgggggatcatgtaactcgccttgatcgttgggaaccggagctgaatgaagccataccaaacgacgagcgtgacaccacgatgcctgtagcaatggcaacaacgttgcgcaaactattaactggcgaactacttactctagcttcccggcaacaattaatagactggatggaggcggataaagttgcaggaccacttctgcgctcggcccttccggctggctggtttattgctgataaatctggagccggtgagcgtgggtctcgcggtatcattgcagcactggggccagatggtaagccctcccgtatcgtagttatctacacgacggggagtcaggcaactatggatgaacgaaatagacagatcgctgagataggtgcctcactgattaagcattggtaactgtcagaccaagtttactcatatatactttagattgatttaaaacttcatttttaatttaaaaggatctaggtgaagatcctttttgataatctcatgaccaaaatcccttaacgtgagttttcgttccactgagcgtcagaccccgtagaaaagatcaaaggatcttcttgagatcctttttttctgcgcgtaatctgctgcttgcaaacaaaaaaaccaccgctaccagcggtggtttgtttgccggatcaagagctaccaactctttttccgaaggtaactggcttcagcagagcgcagataccaaatactgttcttctagtgtagccgtagttaggccaccacttcaagaactctgtagcaccgcctacatacctcgctctgctaatcctgttaccagtggctgctgccagtggcgataagtcgtgtcttaccgggttggactcaagacgatagttaccggataaggcgcagcggtcgggctgaacggggggttcgtgcacacagcccagcttggagcgaacgacctacaccgaactgagatacctacagcgtgagctatgagaaagcgccacgcttcccgaagggagaaaggcggacaggtatccggtaagcggcagggtcggaacaggagagcgcacgagggagcttccagggggaaacgcctggtatctttatagtcctgtcgggtttcgccacctctgacttgagcgtcgatttttgtgatgctcgtcaggggggcggagcctatggaaaaacgccagcaacgcggcctttttacggttcctggccttttgctggccttttgctcacatgtgagggcctatttcccatgattccttcatatttgcatatacgatacaaggctgttagagagataattggaattaatttgactgtaaacacaaagatattagtacaaaatacgtgacgtagaaagtaataatttcttgggtagtttgcagttttaaaattatgttttaaaatggactatcatatgcttaccgtaacttgaaagtatttcgatttcttggctttatatatcttgtggaaaggacgaaacaccgaatttctactaagtgtagattacttccgctttcaccttggagatttttttgttttagagctagaaatagcaagttaaaataaggctagtccgtttttagcgcgtgcgccaattctgcagacaaatggctctagatgcattcgcgaggtaccgagctcgaattcactggccgtcgttttacaacgtcgtgactgggaaaaccctggcgttacccaacttaatcgccttgcagcacatccccctttcgccagctggcgtaatagcgaagaggcccgcaccgatcgcccttcccaacagttgcgcagcctgaatggcgaatggcgcctgatgcggtattttctccttacgcatctgtgcggtatttcacaccgcatatggtgcactctcagtacaatctgctctgatgccgcatagttaagccagccccgacacccgccaacacccgctgacgcgccctgacgggcttgtctgctcccggcatccgcttacagacaagctgtgaccgtctccgggagctgcatgtgtcagaggttttcaccgtcatcaccgaaacgcgcga

SEQ ID NO: 927 - DNA, 2689 bp, Synthetic construct
  source 1..2689: mol_type = other DNA
gacgaaagggcctcgtgatacgcctatttttataggttaatgtcatgataataatggtttcttagacgtcaggtggcacttttcggggaaatgtgcgcggaacccctatttgtttatttttctaaatacattcaaatatgtatccgctcatgagacaataaccctgataaatgcttcaataatattgaaaaaggaagagtatgagtattcaacatttccgtgtcgcccttattcccttttttgcggcattttgccttcctgtttttgctcacccagaaacgctggtgaaagtaaaagatgctgaagatcagttgggtgcacgagtgggttacatcgaactggatctcaacagcggtaagatccttgagagttttcgccccgaagaacgttttccaatgatgagcacttttaaagttctgctatgtggcgcggtattatcccgtattgacgccgggcaagagcaactcggtcgccgcatacactattctcagaatgacttggttgagtactcaccagtcacagaaaagcatcttacggatggcatgacagtaagagaattatgcagtgctgccataaccatgagtgataacactgcggccaacttacttctgacaacgatcggaggaccgaaggagctaaccgcttttttgcacaacatgggggatcatgtaactcgccttgatcgttgggaaccggagctgaatgaagccataccaaacgacgagcgtgacaccacgatgcctgtagcaatggcaacaacgttgcgcaaactattaactggcgaactacttactctagcttcccggcaacaattaatagactggatggaggcggataaagttgcaggaccacttctgcgctcggcccttccggctggctggtttattgctgataaatctggagccggtgagcgtgggtctcgcggtatcattgcagcactggggccagatggtaagccctcccgtatcgtagttatctacacgacggggagtcaggcaactatggatgaacgaaatagacagatcgctgagataggtgcctcactgattaagcattggtaactgtcagaccaagtttactcatatatactttagattgatttaaaacttcatttttaatttaaaaggatctaggtgaagatcctttttgataatctcatgaccaaaatcccttaacgtgagttttcgttccactgagcgtcagaccccgtagaaaagatcaaaggatcttcttgagatcctttttttctgcgcgtaatctgctgcttgcaaacaaaaaaaccaccgctaccagcggtggtttgtttgccggatcaagagctaccaactctttttccgaaggtaactggcttcagcagagcgcagataccaaatactgttcttctagtgtagccgtagttaggccaccacttcaagaactctgtagcaccgcctacatacctcgctctgctaatcctgttaccagtggctgctgccagtggcgataagtcgtgtcttaccgggttggactcaagacgatagttaccggataaggcgcagcggtcgggctgaacggggggttcgtgcacacagcccagcttggagcgaacgacctacaccgaactgagatacctacagcgtgagctatgagaaagcgccacgcttcccgaagggagaaaggcggacaggtatccggtaagcggcagggtcggaacaggagagcgcacgagggagcttccagggggaaacgcctggtatctttatagtcctgtcgggtttcgccacctctgacttgagcgtcgatttttgtgatgctcgtcaggggggcggagcctatggaaaaacgccagcaacgcggcctttttacggttcctggccttttgctggccttttgctcacatgtgagggcctatttcccatgattccttcatatttgcatatacgatacaaggctgttagagagataattggaattaatttgactgtaaacacaaagatattagtacaaaatacgtgacgtagaaagtaataatttcttgggtagtttgcagttttaaaattatgttttaaaatggactatcatatgcttaccgtaacttgaaagtatttcgatttcttggctttatatatcttgtggaaaggacgaaacaccgaatttctactaagtgtagatagatgactgccaaggggcatatgtttttttgttttagagctagaaatagcaagttaaaataaggctagtccgtttttagcgcgtgcgccaattctgcagacaaatggctctagatgcattcgcgaggtaccgagctcgaattcactggccgtcgttttacaacgtcgtgactgggaaaaccctggcgttacccaacttaatcgccttgcagcacatccccctttcgccagctggcgtaatagcgaagaggcccgcaccgatcgcccttcccaacagttgcgcagcctgaatggcgaatggcgcctgatgcggtattttctccttacgcatctgtgcggtatttcacaccgcatatggtgcactctcagtacaatctgctctgatgccgcatagttaagccagccccgacacccgccaacacccgctgacgcgccctgacgggcttgtctgctcccggcatccgcttacagacaagctgtgaccgtctccgggagctgcatgtgtcagaggttttcaccgtcatcaccgaaacgcgcga

SEQ ID NO: 928 - DNA, 2689 bp, Synthetic construct
  source 1..2689: mol_type = other DNA
gacgaaagggcctcgtgatacgcctatttttataggttaatgtcatgataataatggtttcttagacgtcaggtggcacttttcggggaaatgtgcgcggaacccctatttgtttatttttctaaatacattcaaatatgtatccgctcatgagacaataaccctgataaatgcttcaataatattgaaaaaggaagagtatgagtattcaacatttccgtgtcgcccttattcccttttttgcggcattttgccttcctgtttttgctcacccagaaacgctggtgaaagtaaaagatgctgaagatcagttgggtgcacgagtgggttacatcgaactggatctcaacagcggtaagatccttgagagttttcgccccgaagaacgttttccaatgatgagcacttttaaagttctgctatgtggcgcggtattatcccgtattgacgccgggcaagagcaactcggtcgccgcatacactattctcagaatgacttggttgagtactcaccagtcacagaaaagcatcttacggatggcatgacagtaagagaattatgcagtgctgccataaccatgagtgataacactgcggccaacttacttctgacaacgatcggaggaccgaaggagctaaccgcttttttgcacaacatgggggatcatgtaactcgccttgatcgttgggaaccggagctgaatgaagccataccaaacgacgagcgtgacaccacgatgcctgtagcaatggcaacaacgttgcgcaaactattaactggcgaactacttactctagcttcccggcaacaattaatagactggatggaggcggataaagttgcaggaccacttctgcgctcggcccttccggctggctggtttattgctgataaatctggagccggtgagcgtgggtctcgcggtatcattgcagcactggggccagatggtaagccctcccgtatcgtagttatctacacgacggggagtcaggcaactatggatgaacgaaatagacagatcgctgagataggtgcctcactgattaagcattggtaactgtcagaccaagtttactcatatatactttagattgatttaaaacttcatttttaatttaaaaggatctaggtgaagatcctttttgataatctcatgaccaaaatcccttaacgtgagttttcgttccactgagcgtcagaccccgtagaaaagatcaaaggatcttcttgagatcctttttttctgcgcgtaatctgctgcttgcaaacaaaaaaaccaccgctaccagcggtggtttgtttgccggatcaagagctaccaactctttttccgaaggtaactggcttcagcagagcgcagataccaaatactgttcttctagtgtagccgtagttaggccaccacttcaagaactctgtagcaccgcctacatacctcgctctgctaatcctgttaccagtggctgctgccagtggcgataagtcgtgtcttaccgggttggactcaagacgatagttaccggataaggcgcagcggtcgggctgaacggggggttcgtgcacacagcccagcttggagcgaacgacctacaccgaactgagatacctacagcgtgagctatgagaaagcgccacgcttcccgaagggagaaaggcggacaggtatccggtaagcggcagggtcggaacaggagagcgcacgagggagcttccagggggaaacgcctggtatctttatagtcctgtcgggtttcgccacctctgacttgagcgtcgatttttgtgatgctcgtcaggggggcggagcctatggaaaaacgccagcaacgcggcctttttacggttcctggccttttgctggccttttgctcacatgtgagggcctatttcccatgattccttcatatttgcatatacgatacaaggctgttagagagataattggaattaatttgactgtaaacacaaagatattagtacaaaatacgtgacgtagaaagtaataatttcttgggtagtttgcagttttaaaattatgttttaaaatggactatcatatgcttaccgtaacttgaaagtatttcgatttcttggctttatatatcttgtggaaaggacgaaacaccgaatttctactaagtgtagatgcccctgtctaggaaaagctgtctttttttgttttagagctagaaatagcaagttaaaataaggctagtccgtttttagcgcgtgcgccaattctgcagacaaatggctctagatgcattcgcgaggtaccgagctcgaattcactggccgtcgttttacaacgtcgtgactgggaaaaccctggcgttacccaacttaatcgccttgcagcacatccccctttcgccagctggcgtaatagcgaagaggcccgcaccgatcgcccttcccaacagttgcgcagcctgaatggcgaatggcgcctgatgcggtattttctccttacgcatctgtgcggtatttcacaccgcatatggtgcactctcagtacaatctgctctgatgccgcatagttaagccagccccgacacccgccaacacccgctgacgcgccctgacgggcttgtctgctcccggcatccgcttacagacaagctgtgaccgtctccgggagctgcatgtgtcagaggttttcaccgtcatcaccgaaacgcgcga

SEQ ID NO: 929 - DNA, 2689 bp, Synthetic construct
  source 1..2689: mol_type = other DNA
gacgaaagggcctcgtgatacgcctatttttataggttaatgtcatgataataatggtttcttagacgtcaggtggcacttttcggggaaatgtgcgcggaacccctatttgtttatttttctaaatacattcaaatatgtatccgctcatgagacaataaccctgataaatgcttcaataatattgaaaaaggaagagtatgagtattcaacatttccgtgtcgcccttattcccttttttgcggcattttgccttcctgtttttgctcacccagaaacgctggtgaaagtaaaagatgctgaagatcagttgggtgcacgagtgggttacatcgaactggatctcaacagcggtaagatccttgagagttttcgccccgaagaacgttttccaatgatgagcacttttaaagttctgctatgtggcgcggtattatcccgtattgacgccgggcaagagcaactcggtcgccgcatacactattctcagaatgacttggttgagtactcaccagtcacagaaaagcatcttacggatggcatgacagtaagagaattatgcagtgctgccataaccatgagtgataacactgcggccaacttacttctgacaacgatcggaggaccgaaggagctaaccgcttttttgcacaacatgggggatcatgtaactcgccttgatcgttgggaaccggagctgaatgaagccataccaaacgacgagcgtgacaccacgatgcctgtagcaatggcaacaacgttgcgcaaactattaactggcgaactacttactctagcttcccggcaacaattaatagactggatggaggcggataaagttgcaggaccacttctgcgctcggcccttccggctggctggtttattgctgataaatctggagccggtgagcgtgggtctcgcggtatcattgcagcactggggccagatggtaagccctcccgtatcgtagttatctacacgacggggagtcaggcaactatggatgaacgaaatagacagatcgctgagataggtgcctcactgattaagcattggtaactgtcagaccaagtttactcatatatactttagattgatttaaaacttcatttttaatttaaaaggatctaggtgaagatcctttttgataatctcatgaccaaaatcccttaacgtgagttttcgttccactgagcgtcagaccccgtagaaaagatcaaaggatcttcttgagatcctttttttctgcgcgtaatctgctgcttgcaaacaaaaaaaccaccgctaccagcggtggtttgtttgccggatcaagagctaccaactctttttccgaaggtaactggcttcagcagagcgcagataccaaatactgttcttctagtgtagccgtagttaggccaccacttcaagaactctgtagcaccgcctacatacctcgctctgctaatcctgttaccagtggctgctgccagtggcgataagtcgtgtcttaccgggttggactcaagacgatagttaccggataaggcgcagcggtcgggctgaacggggggttcgtgcacacagcccagcttggagcgaacgacctacaccgaactgagatacctacagcgtgagctatgagaaagcgccacgcttcccgaagggagaaaggcggacaggtatccggtaagcggcagggtcggaacaggagagcgcacgagggagcttccagggggaaacgcctggtatctttatagtcctgtcgggtttcgccacctctgacttgagcgtcgatttttgtgatgctcgtcaggggggcggagcctatggaaaaacgccagcaacgcggcctttttacggttcctggccttttgctggccttttgctcacatgtgagggcctatttcccatgattccttcatatttgcatatacgatacaaggctgttagagagataattggaattaatttgactgtaaacacaaagatattagtacaaaatacgtgacgtagaaagtaataatttcttgggtagtttgcagttttaaaattatgttttaaaatggactatcatatgcttaccgtaacttgaaagtatttcgatttcttggctttatatatcttgtggaaaggacgaaacaccgaatttctactaagtgtagatcctacgtcagcacctgggacccctttttttgttttagagctagaaatagcaagttaaaataaggctagtccgtttttagcgcgtgcgccaattctgcagacaaatggctctagatgcattcgcgaggtaccgagctcgaattcactggccgtcgttttacaacgtcgtgactgggaaaaccctggcgttacccaacttaatcgccttgcagcacatccccctttcgccagctggcgtaatagcgaagaggcccgcaccgatcgcccttcccaacagttgcgcagcctgaatggcgaatggcgcctgatgcggtattttctccttacgcatctgtgcggtatttcacaccgcatatggtgcactctcagtacaatctgctctgatgccgcatagttaagccagccccgacacccgccaacacccgctgacgcgccctgacgggcttgtctgctcccggcatccgcttacagacaagctgtgaccgtctccgggagctgcatgtgtcagaggttttcaccgtcatcaccgaaacgcgcga

SEQ ID NO: 930 - DNA, 2689 bp, Synthetic construct
  source 1..2689: mol_type = other DNA
gacgaaagggcctcgtgatacgcctatttttataggttaatgtcatgataataatggtttcttagacgtcaggtggcacttttcggggaaatgtgcgcggaacccctatttgtttatttttctaaatacattcaaatatgtatccgctcatgagacaataaccctgataaatgcttcaataatattgaaaaaggaagagtatgagtattcaacatttccgtgtcgcccttattcccttttttgcggcattttgccttcctgtttttgctcacccagaaacgctggtgaaagtaaaagatgctgaagatcagttgggtgcacgagtgggttacatcgaactggatctcaacagcggtaagatccttgagagttttcgccccgaagaacgttttccaatgatgagcacttttaaagttctgctatgtggcgcggtattatcccgtattgacgccgggcaagagcaactcggtcgccgcatacactattctcagaatgacttggttgagtactcaccagtcacagaaaagcatcttacggatggcatgacagtaagagaattatgcagtgctgccataaccatgagtgataacactgcggccaacttacttctgacaacgatcggaggaccgaaggagctaaccgcttttttgcacaacatgggggatcatgtaactcgccttgatcgttgggaaccggagctgaatgaagccataccaaacgacgagcgtgacaccacgatgcctgtagcaatggcaacaacgttgcgcaaactattaactggcgaactacttactctagcttcccggcaacaattaatagactggatggaggcggataaagttgcaggaccacttctgcgctcggcccttccggctggctggtttattgctgataaatctggagccggtgagcgtgggtctcgcggtatcattgcagcactggggccagatggtaagccctcccgtatcgtagttatctacacgacggggagtcaggcaactatggatgaacgaaatagacagatcgctgagataggtgcctcactgattaagcattggtaactgtcagaccaagtttactcatatatactttagattgatttaaaacttcatttttaatttaaaaggatctaggtgaagatcctttttgataatctcatgaccaaaatcccttaacgtgagttttcgttccactgagcgtcagaccccgtagaaaagatcaaaggatcttcttgagatcctttttttctgcgcgtaatctgctgcttgcaaacaaaaaaaccaccgctaccagcggtggtttgtttgccggatcaagagctaccaactctttttccgaaggtaactggcttcagcagagcgcagataccaaatactgttcttctagtgtagccgtagttaggccaccacttcaagaactctgtagcaccgcctacatacctcgctctgctaatcctgttaccagtggctgctgccagtggcgataagtcgtgtcttaccgggttggactcaagacgatagttaccggataaggcgcagcggtcgggctgaacggggggttcgtgcacacagcccagcttggagcgaacgacctacaccgaactgagatacctacagcgtgagctatgagaaagcgccacgcttcccgaagggagaaaggcggacaggtatccggtaagcggcagggtcggaacaggagagcgcacgagggagcttccagggggaaacgcctggtatctttatagtcctgtcgggtttcgccacctctgacttgagcgtcgatttttgtgatgctcgtcaggggggcggagcctatggaaaaacgccagcaacgcggcctttttacggttcctggccttttgctggccttttgctcacatgtgagggcctatttcccatgattccttcatatttgcatatacgatacaaggctgttagagagataattggaattaatttgactgtaaacacaaagatattagtacaaaatacgtgacgtagaaagtaataatttcttgggtagtttgcagttttaaaattatgttttaaaatggactatcatatgcttaccgtaacttgaaagtatttcgatttcttggctttatatatcttgtggaaaggacgaaacaccgaatttctactaagtgtagatcaggacagcttttcctagacaggtttttttgttttagagctagaaatagcaagttaaaataaggctagtccgtttttagcgcgtgcgccaattctgcagacaaatggctctagatgcattcgcgaggtaccgagctcgaattcactggccgtcgttttacaacgtcgtgactgggaaaaccctggcgttacccaacttaatcgccttgcagcacatccccctttcgccagctggcgtaatagcgaagaggcccgcaccgatcgcccttcccaacagttgcgcagcctgaatggcgaatggcgcctgatgcggtattttctccttacgcatctgtgcggtatttcacaccgcatatggtgcactctcagtacaatctgctctgatgccgcatagttaagccagccccgacacccgccaacacccgctgacgcgccctgacgggcttgtctgctcccggcatccgcttacagacaagctgtgaccgtctccgggagctgcatgtgtcagaggttttcaccgtcatcaccgaaacgcgcga

SEQ ID NO: 931 - DNA, 2689 bp, Synthetic construct
  source 1..2689: mol_type = other DNA
gacgaaagggcctcgtgatacgcctatttttataggttaatgtcatgataataatggtttcttagacgtcaggtggcacttttcggggaaatgtgcgcggaacccctatttgtttatttttctaaatacattcaaatatgtatccgctcatgagacaataaccctgataaatgcttcaataatattgaaaaaggaagagtatgagtattcaacatttccgtgtcgcccttattcccttttttgcggcattttgccttcctgtttttgctcacccagaaacgctggtgaaagtaaaagatgctgaagatcagttgggtgcacgagtgggttacatcgaactggatctcaacagcggtaagatccttgagagttttcgccccgaagaacgttttccaatgatgagcacttttaaagttctgctatgtggcgcggtattatcccgtattgacgccgggcaagagcaactcggtcgccgcatacactattctcagaatgacttggttgagtactcaccagtcacagaaaagcatcttacggatggcatgacagtaagagaattatgcagtgctgccataaccatgagtgataacactgcggccaacttacttctgacaacgatcggaggaccgaaggagctaaccgcttttttgcacaacatgggggatcatgtaactcgccttgatcgttgggaaccggagctgaatgaagccataccaaacgacgagcgtgacaccacgatgcctgtagcaatggcaacaacgttgcgcaaactattaactggcgaactacttactctagcttcccggcaacaattaatagactggatggaggcggataaagttgcaggaccacttctgcgctcggcccttccggctggctggtttattgctgataaatctggagccggtgagcgtgggtctcgcggtatcattgcagcactggggccagatggtaagccctcccgtatcgtagttatctacacgacggggagtcaggcaactatggatgaacgaaatagacagatcgctgagataggtgcctcactgattaagcattggtaactgtcagaccaagtttactcatatatactttagattgatttaaaacttcatttttaatttaaaaggatctaggtgaagatcctttttgataatctcatgaccaaaatcccttaacgtgagttttcgttccactgagcgtcagaccccgtagaaaagatcaaaggatcttcttgagatcctttttttctgcgcgtaatctgctgcttgcaaacaaaaaaaccaccgctaccagcggtggtttgtttgccggatcaagagctaccaactctttttccgaaggtaactggcttcagcagagcgcagataccaaatactgttcttctagtgtagccgtagttaggccaccacttcaagaactctgtagcaccgcctacatacctcgctctgctaatcctgttaccagtggctgctgccagtggcgataagtcgtgtcttaccgggttggactcaagacgatagttaccggataaggcgcagcggtcgggctgaacggggggttcgtgcacacagcccagcttggagcgaacgacctacaccgaactgagatacctacagcgtgagctatgagaaagcgccacgcttcccgaagggagaaaggcggacaggtatccggtaagcggcagggtcggaacaggagagcgcacgagggagcttccagggggaaacgcctggtatctttatagtcctgtcgggtttcgccacctctgacttgagcgtcgatttttgtgatgctcgtcaggggggcggagcctatggaaaaacgccagcaacgcggcctttttacggttcctggccttttgctggccttttgctcacatgtgagggcctatttcccatgattccttcatatttgcatatacgatacaaggctgttagagagataattggaattaatttgactgtaaacacaaagatattagtacaaaatacgtgacgtagaaagtaataatttcttgggtagtttgcagttttaaaattatgttttaaaatggactatcatatgcttaccgtaacttgaaagtatttcgatttcttggctttatatatcttgtggaaaggacgaaacaccgaatttctactaagtgtagatccgtctccaaggtgaaagcggaatttttttgttttagagctagaaatagcaagttaaaataaggctagtccgtttttagcgcgtgcgccaattctgcagacaaatggctctagatgcattcgcgaggtaccgagctcgaattcactggccgtcgttttacaacgtcgtgactgggaaaaccctggcgttacccaacttaatcgccttgcagcacatccccctttcgccagctggcgtaatagcgaagaggcccgcaccgatcgcccttcccaacagttgcgcagcctgaatggcgaatggcgcctgatgcggtattttctccttacgcatctgtgcggtatttcacaccgcatatggtgcactctcagtacaatctgctctgatgccgcatagttaagccagccccgacacccgccaacacccgctgacgcgccctgacgggcttgtctgctcccggcatccgcttacagacaagctgtgaccgtctccgggagctgcatgtgtcagaggttttcaccgtcatcaccgaaacgcgcga

SEQ ID NO: 932 - DNA, 2689 bp, Synthetic construct
  source 1..2689: mol_type = other DNA
gacgaaagggcctcgtgatacgcctatttttataggttaatgtcatgataataatggtttcttagacgtcaggtggcacttttcggggaaatgtgcgcggaacccctatttgtttatttttctaaatacattcaaatatgtatccgctcatgagacaataaccctgataaatgcttcaataatattgaaaaaggaagagtatgagtattcaacatttccgtgtcgcccttattcccttttttgcggcattttgccttcctgtttttgctcacccagaaacgctggtgaaagtaaaagatgctgaagatcagttgggtgcacgagtgggttacatcgaactggatctcaacagcggtaagatccttgagagttttcgccccgaagaacgttttccaatgatgagcacttttaaagttctgctatgtggcgcggtattatcccgtattgacgccgggcaagagcaactcggtcgccgcatacactattctcagaatgacttggttgagtactcaccagtcacagaaaagcatcttacggatggcatgacagtaagagaattatgcagtgctgccataaccatgagtgataacactgcggccaacttacttctgacaacgatcggaggaccgaaggagctaaccgcttttttgcacaacatgggggatcatgtaactcgccttgatcgttgggaaccggagctgaatgaagccataccaaacgacgagcgtgacaccacgatgcctgtagcaatggcaacaacgttgcgcaaactattaactggcgaactacttactctagcttcccggcaacaattaatagactggatggaggcggataaagttgcaggaccacttctgcgctcggcccttccggctggctggtttattgctgataaatctggagccggtgagcgtgggtctcgcggtatcattgcagcactggggccagatggtaagccctcccgtatcgtagttatctacacgacggggagtcaggcaactatggatgaacgaaatagacagatcgctgagataggtgcctcactgattaagcattggtaactgtcagaccaagtttactcatatatactttagattgatttaaaacttcatttttaatttaaaaggatctaggtgaagatcctttttgataatctcatgaccaaaatcccttaacgtgagttttcgttccactgagcgtcagaccccgtagaaaagatcaaaggatcttcttgagatcctttttttctgcgcgtaatctgctgcttgcaaacaaaaaaaccaccgctaccagcggtggtttgtttgccggatcaagagctaccaactctttttccgaaggtaactggcttcagcagagcgcagataccaaatactgttcttctagtgtagccgtagttaggccaccacttcaagaactctgtagcaccgcctacatacctcgctctgctaatcctgttaccagtggctgctgccagtggcgataagtcgtgtcttaccgggttggactcaagacgatagttaccggataaggcgcagcggtcgggctgaacggggggttcgtgcacacagcccagcttggagcgaacgacctacaccgaactgagatacctacagcgtgagctatgagaaagcgccacgcttcccgaagggagaaaggcggacaggtatccggtaagcggcagggtcggaacaggagagcgcacgagggagcttccagggggaaacgcctggtatctttatagtcctgtcgggtttcgccacctctgacttgagcgtcgatttttgtgatgctcgtcaggggggcggagcctatggaaaaacgccagcaacgcggcctttttacggttcctggccttttgctggccttttgctcacatgtgagggcctatttcccatgattccttcatatttgcatatacgatacaaggctgttagagagataattggaattaatttgactgtaaacacaaagatattagtacaaaatacgtgacgtagaaagtaataatttcttgggtagtttgcagttttaaaattatgttttaaaatggactatcatatgcttaccgtaacttgaaagtatttcgatttcttggctttatatatcttgtggaaaggacgaaacaccgaatttctactaagtgtagatgcatggccccattcgcacggctctttttttgttttagagctagaaatagcaagttaaaataaggctagtccgtttttagcgcgtgcgccaattctgcagacaaatggctctagatgcattcgcgaggtaccgagctcgaattcactggccgtcgttttacaacgtcgtgactgggaaaaccctggcgttacccaacttaatcgccttgcagcacatccccctttcgccagctggcgtaatagcgaagaggcccgcaccgatcgcccttcccaacagttgcgcagcctgaatggcgaatggcgcctgatgcggtattttctccttacgcatctgtgcggtatttcacaccgcatatggtgcactctcagtacaatctgctctgatgccgcatagttaagccagccccgacacccgccaacacccgctgacgcgccctgacgggcttgtctgctcccggcatccgcttacagacaagctgtgaccgtctccgggagctgcatgtgtcagaggttttcaccgtcatcaccgaaacgcgcga

SEQ ID NO: 933 - DNA, 2581 bp, Synthetic construct
  source 1..2581: mol_type = other DNA
aggctaggtggaggctcagtgatgataagtctgcgatggtggatgcatgtgtcatggtcatagctgtttcctgtgtgaaattgttatccgctcagagggcacaatcctattccgcgctatccgacaatctccaagacattaggtggagttcagttcggcgtatggcatatgtcgctggaaagaacatgtgagcaaaaggccagcaaaaggccaggaaccgtaaaaaggccgcgttgctggcgtttttccataggctccgcccccctgacgagcatcacaaaaatcgacgctcaagtcagaggtggcgaaacccgacaggactataaagataccaggcgtttccccctggaagctccctcgtgcgctctcctgttccgaccctgccgcttaccggatacctgtccgcctttctcccttcgggaagcgtggcgctttctcatagctcacgctgtaggtatctcagttcggtgtaggtcgttcgctccaagctgggctgtgtgcacgaaccccccgttcagcccgaccgctgcgccttatccggtaactatcgtcttgagtccaacccggtaagacacgacttatcgccactggcagcagccactggtaacaggattagcagagcgaggtatgtaggcggtgctacagagttcttgaagtggtggcctaactacggctacactagaagaacagtatttggtatctgcgctctgctgaagccagttaccttcggaaaaagagttggtagctcttgatccggcaaacaaaccaccgctggtagcggtggtttttttgtttgcaagcagcagattacgcgcagaaaaaaaggatctcaagaagatcctttgatcttttctacggggtctgacgctctattcaacaaagccgccgtcccgtcaagtcagcgtaaatgggtagggggcttcaaatcgtcctcgtgataccaattcggagcctgcttttttgtacaaacttgttgataatggcaattcaaggatcttcacctagatccttttaaattaaaaatgaagttttaaatcaatctaaagtatatatgagtaaacttggtctgacagttaccaatgcttaatcagtgaggcacctatctcagcgatctgtctatttcgttcatccatagttgcctgactccccgtcgtgtagataactacgatacgggagggcttaccatctggccccagtgctgcaatgataccgcgagagccacgctcaccggctccagatttatcagcaataaaccagccagccggaagggccgagcgcagaagtggtcctgcaactttatccgcctccatccagtctattaattgttgccgggaagctagagtaagtagttcgccagttaatagtttgcgcaacgttgttgccattgctacaggcatcgtggtgtcacgctcgtcgtttggtatggcttcattcagctccggttcccaacgatcaaggcgagttacatgatcccccatgttgtgcaaaaaagcggttagctccttcggtcctccgatcgttgtcagaagtaagttggccgcagtgttatcactcatggttatggcagcactgcataattctcttactgtcatgccatccgtaagatgcttttctgtgactggtgagtactcaaccaagtcattctgagaatagtgtatgcggcgaccgagttgctcttgcccggcgtcaatacgggataataccgcgccacatagcagaactttaaaagtgctcatcattggaaaacgttcttcggggcgaaaactctcaaggatcttaccgctgttgagatccagttcgatgtaacccactcgtgcacccaactgatcttcagcatcttttactttcaccagcgtttctgggtgagcaaaaacaggaaggcaaaatgccgcaaaaaagggaataagggcgacacggaaatgttgaatactcatactcttcctttttcaatattattgaagcatttatcagggttattgtctcatgagcggatacatatttgaatgtatttagaaaaataaacaaataggggttccgcgcacatttccccgaaaagtgccagatacctgaaacaaaacccatcgtacggccaaggaagtctccaataactgtgatccaccacaagcgccagggttttcccagtcacgacgttgtaaaacgacggccagtcatgcataatccgcacgcatctggaataaggaagtgccattccgcctgacctgagggcctatttcccatgattccttcatatttgcatatacgatacaaggctgttagagagataattggaattaatttgactgtaaacacaaagatattagtacaaaatacgtgacgtagaaagtaataatttcttgggtagtttgcagttttaaaattatgttttaaaatggactatcatatgcttaccgtaacttgaaagtatttcgatttcttggctttatatatcttgtggaaaggacgaaacaccgaatttctactaagtgtagatgcagcttcctcctcctttatttttttttttctgcagatcgtcgaacgccttagggcattcgatgagatgaccactgacgtatgcggccgc

SEQ ID NO: 934 - DNA, 2689 bp, Synthetic construct
  source 1..2689: mol_type = other DNA
gacgaaagggcctcgtgatacgcctatttttataggttaatgtcatgataataatggtttcttagacgtcaggtggcacttttcggggaaatgtgcgcggaacccctatttgtttatttttctaaatacattcaaatatgtatccgctcatgagacaataaccctgataaatgcttcaataatattgaaaaaggaagagtatgagtattcaacatttccgtgtcgcccttattcccttttttgcggcattttgccttcctgtttttgctcacccagaaacgctggtgaaagtaaaagatgctgaagatcagttgggtgcacgagtgggttacatcgaactggatctcaacagcggtaagatccttgagagttttcgccccgaagaacgttttccaatgatgagcacttttaaagttctgctatgtggcgcggtattatcccgtattgacgccgggcaagagcaactcggtcgccgcatacactattctcagaatgacttggttgagtactcaccagtcacagaaaagcatcttacggatggcatgacagtaagagaattatgcagtgctgccataaccatgagtgataacactgcggccaacttacttctgacaacgatcggaggaccgaaggagctaaccgcttttttgcacaacatgggggatcatgtaactcgccttgatcgttgggaaccggagctgaatgaagccataccaaacgacgagcgtgacaccacgatgcctgtagcaatggcaacaacgttgcgcaaactattaactggcgaactacttactctagcttcccggcaacaattaatagactggatggaggcggataaagttgcaggaccacttctgcgctcggcccttccggctggctggtttattgctgataaatctggagccggtgagcgtgggtctcgcggtatcattgcagcactggggccagatggtaagccctcccgtatcgtagttatctacacgacggggagtcaggcaactatggatgaacgaaatagacagatcgctgagataggtgcctcactgattaagcattggtaactgtcagaccaagtttactcatatatactttagattgatttaaaacttcatttttaatttaaaaggatctaggtgaagatcctttttgataatctcatgaccaaaatcccttaacgtgagttttcgttccactgagcgtcagaccccgtagaaaagatcaaaggatcttcttgagatcctttttttctgcgcgtaatctgctgcttgcaaacaaaaaaaccaccgctaccagcggtggtttgtttgccggatcaagagctaccaactctttttccgaaggtaactggcttcagcagagcgcagataccaaatactgttcttctagtgtagccgtagttaggccaccacttcaagaactctgtagcaccgcctacatacctcgctctgctaatcctgttaccagtggctgctgccagtggcgataagtcgtgtcttaccgggttggactcaagacgatagttaccggataaggcgcagcggtcgggctgaacggggggttcgtgcacacagcccagcttggagcgaacgacctacaccgaactgagatacctacagcgtgagctatgagaaagcgccacgcttcccgaagggagaaaggcggacaggtatccggtaagcggcagggtcggaacaggagagcgcacgagggagcttccagggggaaacgcctggtatctttatagtcctgtcgggtttcgccacctctgacttgagcgtcgatttttgtgatgctcgtcaggggggcggagcctatggaaaaacgccagcaacgcggcctttttacggttcctggccttttgctggccttttgctcacatgtgagggcctatttcccatgattccttcatatttgcatatacgatacaaggctgttagagagataattggaattaatttgactgtaaacacaaagatattagtacaaaatacgtgacgtagaaagtaataatttcttgggtagtttgcagttttaaaattatgttttaaaatggactatcatatgcttaccgtaacttgaaagtatttcgatttcttggctttatatatcttgtggaaaggacgaaacaccgaatttctactaagtgtagatggcctcctccttcctagtctccttttttttgttttagagctagaaatagcaagttaaaataaggctagtccgtttttagcgcgtgcgccaattctgcagacaaatggctctagatgcattcgcgaggtaccgagctcgaattcactggccgtcgttttacaacgtcgtgactgggaaaaccctggcgttacccaacttaatcgccttgcagcacatccccctttcgccagctggcgtaatagcgaagaggcccgcaccgatcgcccttcccaacagttgcgcagcctgaatggcgaatggcgcctgatgcggtattttctccttacgcatctgtgcggtatttcacaccgcatatggtgcactctcagtacaatctgctctgatgccgcatagttaagccagccccgacacccgccaacacccgctgacgcgccctgacgggcttgtctgctcccggcatccgcttacagacaagctgtgaccgtctccgggagctgcatgtgtcagaggttttcaccgtcatcaccgaaacgcgcga

SEQ ID NO: 935 - DNA, 2689 bp, Synthetic construct
  source 1..2689: mol_type = other DNA
gacgaaagggcctcgtgatacgcctatttttataggttaatgtcatgataataatggtttcttagacgtcaggtggcacttttcggggaaatgtgcgcggaacccctatttgtttatttttctaaatacattcaaatatgtatccgctcatgagacaataaccctgataaatgcttcaataatattgaaaaaggaagagtatgagtattcaacatttccgtgtcgcccttattcccttttttgcggcattttgccttcctgtttttgctcacccagaaacgctggtgaaagtaaaagatgctgaagatcagttgggtgcacgagtgggttacatcgaactggatctcaacagcggtaagatccttgagagttttcgccccgaagaacgttttccaatgatgagcacttttaaagttctgctatgtggcgcggtattatcccgtattgacgccgggcaagagcaactcggtcgccgcatacactattctcagaatgacttggttgagtactcaccagtcacagaaaagcatcttacggatggcatgacagtaagagaattatgcagtgctgccataaccatgagtgataacactgcggccaacttacttctgacaacgatcggaggaccgaaggagctaaccgcttttttgcacaacatgggggatcatgtaactcgccttgatcgttgggaaccggagctgaatgaagccataccaaacgacgagcgtgacaccacgatgcctgtagcaatggcaacaacgttgcgcaaactattaactggcgaactacttactctagcttcccggcaacaattaatagactggatggaggcggataaagttgcaggaccacttctgcgctcggcccttccggctggctggtttattgctgataaatctggagccggtgagcgtgggtctcgcggtatcattgcagcactggggccagatggtaagccctcccgtatcgtagttatctacacgacggggagtcaggcaactatggatgaacgaaatagacagatcgctgagataggtgcctcactgattaagcattggtaactgtcagaccaagtttactcatatatactttagattgatttaaaacttcatttttaatttaaaaggatctaggtgaagatcctttttgataatctcatgaccaaaatcccttaacgtgagttttcgttccactgagcgtcagaccccgtagaaaagatcaaaggatcttcttgagatcctttttttctgcgcgtaatctgctgcttgcaaacaaaaaaaccaccgctaccagcggtggtttgtttgccggatcaagagctaccaactctttttccgaaggtaactggcttcagcagagcgcagataccaaatactgttcttctagtgtagccgtagttaggccaccacttcaagaactctgtagcaccgcctacatacctcgctctgctaatcctgttaccagtggctgctgccagtggcgataagtcgtgtcttaccgggttggactcaagacgatagttaccggataaggcgcagcggtcgggctgaacggggggttcgtgcacacagcccagcttggagcgaacgacctacaccgaactgagatacctacagcgtgagctatgagaaagcgccacgcttcccgaagggagaaaggcggacaggtatccggtaagcggcagggtcggaacaggagagcgcacgagggagcttccagggggaaacgcctggtatctttatagtcctgtcgggtttcgccacctctgacttgagcgtcgatttttgtgatgctcgtcaggggggcggagcctatggaaaaacgccagcaacgcggcctttttacggttcctggccttttgctggccttttgctcacatgtgagggcctatttcccatgattccttcatatttgcatatacgatacaaggctgttagagagataattggaattaatttgactgtaaacacaaagatattagtacaaaatacgtgacgtagaaagtaataatttcttgggtagtttgcagttttaaaattatgttttaaaatggactatcatatgcttaccgtaacttgaaagtatttcgatttcttggctttatatatcttgtggaaaggacgaaacaccgaatttctactaagtgtagattattcccagggccggttaatgtgtttttttgttttagagctagaaatagcaagttaaaataaggctagtccgtttttagcgcgtgcgccaattctgcagacaaatggctctagatgcattcgcgaggtaccgagctcgaattcactggccgtcgttttacaacgtcgtgactgggaaaaccctggcgttacccaacttaatcgccttgcagcacatccccctttcgccagctggcgtaatagcgaagaggcccgcaccgatcgcccttcccaacagttgcgcagcctgaatggcgaatggcgcctgatgcggtattttctccttacgcatctgtgcggtatttcacaccgcatatggtgcactctcagtacaatctgctctgatgccgcatagttaagccagccccgacacccgccaacacccgctgacgcgccctgacgggcttgtctgctcccggcatccgcttacagacaagctgtgaccgtctccgggagctgcatgtgtcagaggttttcaccgtcatcaccgaaacgcgcga

SEQ ID NO: 936 - DNA, 2689 bp, Synthetic construct
  source 1..2689: mol_type = other DNA
gacgaaagggcctcgtgatacgcctatttttataggttaatgtcatgataataatggtttcttagacgtcaggtggcacttttcggggaaatgtgcgcggaacccctatttgtttatttttctaaatacattcaaatatgtatccgctcatgagacaataaccctgataaatgcttcaataatattgaaaaaggaagagtatgagtattcaacatttccgtgtcgcccttattcccttttttgcggcattttgccttcctgtttttgctcacccagaaacgctggtgaaagtaaaagatgctgaagatcagttgggtgcacgagtgggttacatcgaactggatctcaacagcggtaagatccttgagagttttcgccccgaagaacgttttccaatgatgagcacttttaaagttctgctatgtggcgcggtattatcccgtattgacgccgggcaagagcaactcggtcgccgcatacactattctcagaatgacttggttgagtactcaccagtcacagaaaagcatcttacggatggcatgacagtaagagaattatgcagtgctgccataaccatgagtgataacactgcggccaacttacttctgacaacgatcggaggaccgaaggagctaaccgcttttttgcacaacatgggggatcatgtaactcgccttgatcgttgggaaccggagctgaatgaagccataccaaacgacgagcgtgacaccacgatgcctgtagcaatggcaacaacgttgcgcaaactattaactggcgaactacttactctagcttcccggcaacaattaatagactggatggaggcggataaagttgcaggaccacttctgcgctcggcccttccggctggctggtttattgctgataaatctggagccggtgagcgtgggtctcgcggtatcattgcagcactggggccagatggtaagccctcccgtatcgtagttatctacacgacggggagtcaggcaactatggatgaacgaaatagacagatcgctgagataggtgcctcactgattaagcattggtaactgtcagaccaagtttactcatatatactttagattgatttaaaacttcatttttaatttaaaaggatctaggtgaagatcctttttgataatctcatgaccaaaatcccttaacgtgagttttcgttccactgagcgtcagaccccgtagaaaagatcaaaggatcttcttgagatcctttttttctgcgcgtaatctgctgcttgcaaacaaaaaaaccaccgctaccagcggtggtttgtttgccggatcaagagctaccaactctttttccgaaggtaactggcttcagcagagcgcagataccaaatactgttcttctagtgtagccgtagttaggccaccacttcaagaactctgtagcaccgcctacatacctcgctctgctaatcctgttaccagtggctgctgccagtggcgataagtcgtgtcttaccgggttggactcaagacgatagttaccggataaggcgcagcggtcgggctgaacggggggttcgtgcacacagcccagcttggagcgaacgacctacaccgaactgagatacctacagcgtgagctatgagaaagcgccacgcttcccgaagggagaaaggcggacaggtatccggtaagcggcagggtcggaacaggagagcgcacgagggagcttccagggggaaacgcctggtatctttatagtcctgtcgggtttcgccacctctgacttgagcgtcgatttttgtgatgctcgtcaggggggcggagcctatggaaaaacgccagcaacgcggcctttttacggttcctggccttttgctggccttttgctcacatgtgagggcctatttcccatgattccttcatatttgcatatacgatacaaggctgttagagagataattggaattaatttgactgtaaacacaaagatattagtacaaaatacgtgacgtagaaagtaataatttcttgggtagtttgcagttttaaaattatgttttaaaatggactatcatatgcttaccgtaacttgaaagtatttcgatttcttggctttatatatcttgtggaaaggacgaaacaccgaatttctactaagtgtagataccaaagcgccgatggatgtggctttttttgttttagagctagaaatagcaagttaaaataaggctagtccgtttttagcgcgtgcgccaattctgcagacaaatggctctagatgcattcgcgaggtaccgagctcgaattcactggccgtcgttttacaacgtcgtgactgggaaaaccctggcgttacccaacttaatcgccttgcagcacatccccctttcgccagctggcgtaatagcgaagaggcccgcaccgatcgcccttcccaacagttgcgcagcctgaatggcgaatggcgcctgatgcggtattttctccttacgcatctgtgcggtatttcacaccgcatatggtgcactctcagtacaatctgctctgatgccgcatagttaagccagccccgacacccgccaacacccgctgacgcgccctgacgggcttgtctgctcccggcatccgcttacagacaagctgtgaccgtctccgggagctgcatgtgtcagaggttttcaccgtcatcaccgaaacgcgcga

SEQ ID NO: 937 - DNA, 2689 bp, Synthetic construct
  source 1..2689: mol_type = other DNA
gacgaaagggcctcgtgatacgcctatttttataggttaatgtcatgataataatggtttcttagacgtcaggtggcacttttcggggaaatgtgcgcggaacccctatttgtttatttttctaaatacattcaaatatgtatccgctcatgagacaataaccctgataaatgcttcaataatattgaaaaaggaagagtatgagtattcaacatttccgtgtcgcccttattcccttttttgcggcattttgccttcctgtttttgctcacccagaaacgctggtgaaagtaaaagatgctgaagatcagttgggtgcacgagtgggttacatcgaactggatctcaacagcggtaagatccttgagagttttcgccccgaagaacgttttccaatgatgagcacttttaaagttctgctatgtggcgcggtattatcccgtattgacgccgggcaagagcaactcggtcgccgcatacactattctcagaatgacttggttgagtactcaccagtcacagaaaagcatcttacggatggcatgacagtaagagaattatgcagtgctgccataaccatgagtgataacactgcggccaacttacttctgacaacgatcggaggaccgaaggagctaaccgcttttttgcacaacatgggggatcatgtaactcgccttgatcgttgggaaccggagctgaatgaagccataccaaacgacgagcgtgacaccacgatgcctgtagcaatggcaacaacgttgcgcaaactattaactggcgaactacttactctagcttcccggcaacaattaatagactggatggaggcggataaagttgcaggaccacttctgcgctcggcccttccggctggctggtttattgctgataaatctggagccggtgagcgtgggtctcgcggtatcattgcagcactggggccagatggtaagccctcccgtatcgtagttatctacacgacggggagtcaggcaactatggatgaacgaaatagacagatcgctgagataggtgcctcactgattaagcattggtaactgtcagaccaagtttactcatatatactttagattgatttaaaacttcatttttaatttaaaaggatctaggtgaagatcctttttgataatctcatgaccaaaatcccttaacgtgagttttcgttccactgagcgtcagaccccgtagaaaagatcaaaggatcttcttgagatcctttttttctgcgcgtaatctgctgcttgcaaacaaaaaaaccaccgctaccagcggtggtttgtttgccggatcaagagctaccaactctttttccgaaggtaactggcttcagcagagcgcagataccaaatactgttcttctagtgtagccgtagttaggccaccacttcaagaactctgtagcaccgcctacatacctcgctctgctaatcctgttaccagtggctgctgccagtggcgataagtcgtgtcttaccgggttggactcaagacgatagttaccggataaggcgcagcggtcgggctgaacggggggttcgtgcacacagcccagcttggagcgaacgacctacaccgaactgagatacctacagcgtgagctatgagaaagcgccacgcttcccgaagggagaaaggcggacaggtatccggtaagcggcagggtcggaacaggagagcgcacgagggagcttccagggggaaacgcctggtatctttatagtcctgtcgggtttcgccacctctgacttgagcgtcgatttttgtgatgctcgtcaggggggcggagcctatggaaaaacgccagcaacgcggcctttttacggttcctggccttttgctggccttttgctcacatgtgagggcctatttcccatgattccttcatatttgcatatacgatacaaggctgttagagagataattggaattaatttgactgtaaacacaaagatattagtacaaaatacgtgacgtagaaagtaataatttcttgggtagtttgcagttttaaaattatgttttaaaatggactatcatatgcttaccgtaacttgaaagtatttcgatttcttggctttatatatcttgtggaaaggacgaaacaccgaatttctactaagtgtagattttgtactttgtcctccggttcttttttttgttttagagctagaaatagcaagttaaaataaggctagtccgtttttagcgcgtgcgccaattctgcagacaaatggctctagatgcattcgcgaggtaccgagctcgaattcactggccgtcgttttacaacgtcgtgactgggaaaaccctggcgttacccaacttaatcgccttgcagcacatccccctttcgccagctggcgtaatagcgaagaggcccgcaccgatcgcccttcccaacagttgcgcagcctgaatggcgaatggcgcctgatgcggtattttctccttacgcatctgtgcggtatttcacaccgcatatggtgcactctcagtacaatctgctctgatgccgcatagttaagccagccccgacacccgccaacacccgctgacgcgccctgacgggcttgtctgctcccggcatccgcttacagacaagctgtgaccgtctccgggagctgcatgtgtcagaggttttcaccgtcatcaccgaaacgcgcga

SEQ ID NO: 938 - DNA, 2689 bp, Synthetic construct
  source 1..2689: mol_type = other DNA
gacgaaagggcctcgtgatacgcctatttttataggttaatgtcatgataataatggtttcttagacgtcaggtggcacttttcggggaaatgtgcgcggaacccctatttgtttatttttctaaatacattcaaatatgtatccgctcatgagacaataaccctgataaatgcttcaataatattgaaaaaggaagagtatgagtattcaacatttccgtgtcgcccttattcccttttttgcggcattttgccttcctgtttttgctcacccagaaacgctggtgaaagtaaaagatgctgaagatcagttgggtgcacgagtgggttacatcgaactggatctcaacagcggtaagatccttgagagttttcgccccgaagaacgttttccaatgatgagcacttttaaagttctgctatgtggcgcggtattatcccgtattgacgccgggcaagagcaactcggtcgccgcatacactattctcagaatgacttggttgagtactcaccagtcacagaaaagcatcttacggatggcatgacagtaagagaattatgcagtgctgccataaccatgagtgataacactgcggccaacttacttctgacaacgatcggaggaccgaaggagctaaccgcttttttgcacaacatgggggatcatgtaactcgccttgatcgttgggaaccggagctgaatgaagccataccaaacgacgagcgtgacaccacgatgcctgtagcaatggcaacaacgttgcgcaaactattaactggcgaactacttactctagcttcccggcaacaattaatagactggatggaggcggataaagttgcaggaccacttctgcgctcggcccttccggctggctggtttattgctgataaatctggagccggtgagcgtgggtctcgcggtatcattgcagcactggggccagatggtaagccctcccgtatcgtagttatctacacgacggggagtcaggcaactatggatgaacgaaatagacagatcgctgagataggtgcctcactgattaagcattggtaactgtcagaccaagtttactcatatatactttagattgatttaaaacttcatttttaatttaaaaggatctaggtgaagatcctttttgataatctcatgaccaaaatcccttaacgtgagttttcgttccactgagcgtcagaccccgtagaaaagatcaaaggatcttcttgagatcctttttttctgcgcgtaatctgctgcttgcaaacaaaaaaaccaccgctaccagcggtggtttgtttgccggatcaagagctaccaactctttttccgaaggtaactggcttcagcagagcgcagataccaaatactgttcttctagtgtagccgtagttaggccaccacttcaagaactctgtagcaccgcctacatacctcgctctgctaatcctgttaccagtggctgctgccagtggcgataagtcgtgtcttaccgggttggactcaagacgatagttaccggataaggcgcagcggtcgggctgaacggggggttcgtgcacacagcccagcttggagcgaacgacctacaccgaactgagatacctacagcgtgagctatgagaaagcgccacgcttcccgaagggagaaaggcggacaggtatccggtaagcggcagggtcggaacaggagagcgcacgagggagcttccagggggaaacgcctggtatctttatagtcctgtcgggtttcgccacctctgacttgagcgtcgatttttgtgatgctcgtcaggggggcggagcctatggaaaaacgccagcaacgcggcctttttacggttcctggccttttgctggccttttgctcacatgtgagggcctatttcccatgattccttcatatttgcatatacgatacaaggctgttagagagataattggaattaatttgactgtaaacacaaagatattagtacaaaatacgtgacgtagaaagtaataatttcttgggtagtttgcagttttaaaattatgttttaaaatggactatcatatgcttaccgtaacttgaaagtatttcgatttcttggctttatatatcttgtggaaaggacgaaacaccgaatttctactaagtgtagattttccctcactcctgctcggtgatttttttgttttagagctagaaatagcaagttaaaataaggctagtccgtttttagcgcgtgcgccaattctgcagacaaatggctctagatgcattcgcgaggtaccgagctcgaattcactggccgtcgttttacaacgtcgtgactgggaaaaccctggcgttacccaacttaatcgccttgcagcacatccccctttcgccagctggcgtaatagcgaagaggcccgcaccgatcgcccttcccaacagttgcgcagcctgaatggcgaatggcgcctgatgcggtattttctccttacgcatctgtgcggtatttcacaccgcatatggtgcactctcagtacaatctgctctgatgccgcatagttaagccagccccgacacccgccaacacccgctgacgcgccctgacgggcttgtctgctcccggcatccgcttacagacaagctgtgaccgtctccgggagctgcatgtgtcagaggttttcaccgtcatcaccgaaacgcgcga

SEQ ID NO: 939 - DNA, 2581 bp, Synthetic construct
  source 1..2581: mol_type = other DNA
aggctaggtggaggctcagtgatgataagtctgcgatggtggatgcatgtgtcatggtcatagctgtttcctgtgtgaaattgttatccgctcagagggcacaatcctattccgcgctatccgacaatctccaagacattaggtggagttcagttcggcgtatggcatatgtcgctggaaagaacatgtgagcaaaaggccagcaaaaggccaggaaccgtaaaaaggccgcgttgctggcgtttttccataggctccgcccccctgacgagcatcacaaaaatcgacgctcaagtcagaggtggcgaaacccgacaggactataaagataccaggcgtttccccctggaagctccctcgtgcgctctcctgttccgaccctgccgcttaccggatacctgtccgcctttctcccttcgggaagcgtggcgctttctcatagctcacgctgtaggtatctcagttcggtgtaggtcgttcgctccaagctgggctgtgtgcacgaaccccccgttcagcccgaccgctgcgccttatccggtaactatcgtcttgagtccaacccggtaagacacgacttatcgccactggcagcagccactggtaacaggattagcagagcgaggtatgtaggcggtgctacagagttcttgaagtggtggcctaactacggctacactagaagaacagtatttggtatctgcgctctgctgaagccagttaccttcggaaaaagagttggtagctcttgatccggcaaacaaaccaccgctggtagcggtggtttttttgtttgcaagcagcagattacgcgcagaaaaaaaggatctcaagaagatcctttgatcttttctacggggtctgacgctctattcaacaaagccgccgtcccgtcaagtcagcgtaaatgggtagggggcttcaaatcgtcctcgtgataccaattcggagcctgcttttttgtacaaacttgttgataatggcaattcaaggatcttcacctagatccttttaaattaaaaatgaagttttaaatcaatctaaagtatatatgagtaaacttggtctgacagttaccaatgcttaatcagtgaggcacctatctcagcgatctgtctatttcgttcatccatagttgcctgactccccgtcgtgtagataactacgatacgggagggcttaccatctggccccagtgctgcaatgataccgcgagagccacgctcaccggctccagatttatcagcaataaaccagccagccggaagggccgagcgcagaagtggtcctgcaactttatccgcctccatccagtctattaattgttgccgggaagctagagtaagtagttcgccagttaatagtttgcgcaacgttgttgccattgctacaggcatcgtggtgtcacgctcgtcgtttggtatggcttcattcagctccggttcccaacgatcaaggcgagttacatgatcccccatgttgtgcaaaaaagcggttagctccttcggtcctccgatcgttgtcagaagtaagttggccgcagtgttatcactcatggttatggcagcactgcataattctcttactgtcatgccatccgtaagatgcttttctgtgactggtgagtactcaaccaagtcattctgagaatagtgtatgcggcgaccgagttgctcttgcccggcgtcaatacgggataataccgcgccacatagcagaactttaaaagtgctcatcattggaaaacgttcttcggggcgaaaactctcaaggatcttaccgctgttgagatccagttcgatgtaacccactcgtgcacccaactgatcttcagcatcttttactttcaccagcgtttctgggtgagcaaaaacaggaaggcaaaatgccgcaaaaaagggaataagggcgacacggaaatgttgaatactcatactcttcctttttcaatattattgaagcatttatcagggttattgtctcatgagcggatacatatttgaatgtatttagaaaaataaacaaataggggttccgcgcacatttccccgaaaagtgccagatacctgaaacaaaacccatcgtacggccaaggaagtctccaataactgtgatccaccacaagcgccagggttttcccagtcacgacgttgtaaaacgacggccagtcatgcataatccgcacgcatctggaataaggaagtgccattccgcctgacctgagggcctatttcccatgattccttcatatttgcatatacgatacaaggctgttagagagataattggaattaatttgactgtaaacacaaagatattagtacaaaatacgtgacgtagaaagtaataatttcttgggtagtttgcagttttaaaattatgttttaaaatggactatcatatgcttaccgtaacttgaaagtatttcgatttcttggctttatatatcttgtggaaaggacgaaacaccgaatttctactaagtgtagatccgagcaggagtgagggaaacggtttttttctgcagatcgtcgaacgccttagggcattcgatgagatgaccactgacgtatgcggccgc

SEQ ID NO: 940 - DNA, 2581 bp, Synthetic construct
  source 1..2581: mol_type = other DNA
aggctaggtggaggctcagtgatgataagtctgcgatggtggatgcatgtgtcatggtcatagctgtttcctgtgtgaaattgttatccgctcagagggcacaatcctattccgcgctatccgacaatctccaagacattaggtggagttcagttcggcgtatggcatatgtcgctggaaagaacatgtgagcaaaaggccagcaaaaggccaggaaccgtaaaaaggccgcgttgctggcgtttttccataggctccgcccccctgacgagcatcacaaaaatcgacgctcaagtcagaggtggcgaaacccgacaggactataaagataccaggcgtttccccctggaagctccctcgtgcgctctcctgttccgaccctgccgcttaccggatacctgtccgcctttctcccttcgggaagcgtggcgctttctcatagctcacgctgtaggtatctcagttcggtgtaggtcgttcgctccaagctgggctgtgtgcacgaaccccccgttcagcccgaccgctgcgccttatccggtaactatcgtcttgagtccaacccggtaagacacgacttatcgccactggcagcagccactggtaacaggattagcagagcgaggtatgtaggcggtgctacagagttcttgaagtggtggcctaactacggctacactagaagaacagtatttggtatctgcgctctgctgaagccagttaccttcggaaaaagagttggtagctcttgatccggcaaacaaaccaccgctggtagcggtggtttttttgtttgcaagcagcagattacgcgcagaaaaaaaggatctcaagaagatcctttgatcttttctacggggtctgacgctctattcaacaaagccgccgtcccgtcaagtcagcgtaaatgggtagggggcttcaaatcgtcctcgtgataccaattcggagcctgcttttttgtacaaacttgttgataatggcaattcaaggatcttcacctagatccttttaaattaaaaatgaagttttaaatcaatctaaagtatatatgagtaaacttggtctgacagttaccaatgcttaatcagtgaggcacctatctcagcgatctgtctatttcgttcatccatagttgcctgactccccgtcgtgtagataactacgatacgggagggcttaccatctggccccagtgctgcaatgataccgcgagagccacgctcaccggctccagatttatcagcaataaaccagccagccggaagggccgagcgcagaagtggtcctgcaactttatccgcctccatccagtctattaattgttgccgggaagctagagtaagtagttcgccagttaatagtttgcgcaacgttgttgccattgctacaggcatcgtggtgtcacgctcgtcgtttggtatggcttcattcagctccggttcccaacgatcaaggcgagttacatgatcccccatgttgtgcaaaaaagcggttagctccttcggtcctccgatcgttgtcagaagtaagttggccgcagtgttatcactcatggttatggcagcactgcataattctcttactgtcatgccatccgtaagatgcttttctgtgactggtgagtactcaaccaagtcattctgagaatagtgtatgcggcgaccgagttgctcttgcccggcgtcaatacgggataataccgcgccacatagcagaactttaaaagtgctcatcattggaaaacgttcttcggggcgaaaactctcaaggatcttaccgctgttgagatccagttcgatgtaacccactcgtgcacccaactgatcttcagcatcttttactttcaccagcgtttctgggtgagcaaaaacaggaaggcaaaatgccgcaaaaaagggaataagggcgacacggaaatgttgaatactcatactcttcctttttcaatattattgaagcatttatcagggttattgtctcatgagcggatacatatttgaatgtatttagaaaaataaacaaataggggttccgcgcacatttccccgaaaagtgccagatacctgaaacaaaacccatcgtacggccaaggaagtctccaataactgtgatccaccacaagcgccagggttttcccagtcacgacgttgtaaaacgacggccagtcatgcataatccgcacgcatctggaataaggaagtgccattccgcctgacctgagggcctatttcccatgattccttcatatttgcatatacgatacaaggctgttagagagataattggaattaatttgactgtaaacacaaagatattagtacaaaatacgtgacgtagaaagtaataatttcttgggtagtttgcagttttaaaattatgttttaaaatggactatcatatgcttaccgtaacttgaaagtatttcgatttcttggctttatatatcttgtggaaaggacgaaacaccgaatttctactaagtgtagatccttggagacggcgactctctgctttttttctgcagatcgtcgaacgccttagggcattcgatgagatgaccactgacgtatgcggccgc

SEQ ID NO: 941 - DNA, 2581 bp, Synthetic construct
  source 1..2581: mol_type = other DNA
aggctaggtggaggctcagtgatgataagtctgcgatggtggatgcatgtgtcatggtcatagctgtttcctgtgtgaaattgttatccgctcagagggcacaatcctattccgcgctatccgacaatctccaagacattaggtggagttcagttcggcgtatggcatatgtcgctggaaagaacatgtgagcaaaaggccagcaaaaggccaggaaccgtaaaaaggccgcgttgctggcgtttttccataggctccgcccccctgacgagcatcacaaaaatcgacgctcaagtcagaggtggcgaaacccgacaggactataaagataccaggcgtttccccctggaagctccctcgtgcgctctcctgttccgaccctgccgcttaccggatacctgtccgcctttctcccttcgggaagcgtggcgctttctcatagctcacgctgtaggtatctcagttcggtgtaggtcgttcgctccaagctgggctgtgtgcacgaaccccccgttcagcccgaccgctgcgccttatccggtaactatcgtcttgagtccaacccggtaagacacgacttatcgccactggcagcagccactggtaacaggattagcagagcgaggtatgtaggcggtgctacagagttcttgaagtggtggcctaactacggctacactagaagaacagtatttggtatctgcgctctgctgaagccagttaccttcggaaaaagagttggtagctcttgatccggcaaacaaaccaccgctggtagcggtggtttttttgtttgcaagcagcagattacgcgcagaaaaaaaggatctcaagaagatcctttgatcttttctacggggtctgacgctctattcaacaaagccgccgtcccgtcaagtcagcgtaaatgggtagggggcttcaaatcgtcctcgtgataccaattcggagcctgcttttttgtacaaacttgttgataatggcaattcaaggatcttcacctagatccttttaaattaaaaatgaagttttaaatcaatctaaagtatatatgagtaaacttggtctgacagttaccaatgcttaatcagtgaggcacctatctcagcgatctgtctatttcgttcatccatagttgcctgactccccgtcgtgtagataactacgatacgggagggcttaccatctggccccagtgctgcaatgataccgcgagagccacgctcaccggctccagatttatcagcaataaaccagccagccggaagggccgagcgcagaagtggtcctgcaactttatccgcctccatccagtctattaattgttgccgggaagctagagtaagtagttcgccagttaatagtttgcgcaacgttgttgccattgctacaggcatcgtggtgtcacgctcgtcgtttggtatggcttcattcagctccggttcccaacgatcaaggcgagttacatgatcccccatgttgtgcaaaaaagcggttagctccttcggtcctccgatcgttgtcagaagtaagttggccgcagtgttatcactcatggttatggcagcactgcataattctcttactgtcatgccatccgtaagatgcttttctgtgactggtgagtactcaaccaagtcattctgagaatagtgtatgcggcgaccgagttgctcttgcccggcgtcaatacgggataataccgcgccacatagcagaactttaaaagtgctcatcattggaaaacgttcttcggggcgaaaactctcaaggatcttaccgctgttgagatccagttcgatgtaacccactcgtgcacccaactgatcttcagcatcttttactttcaccagcgtttctgggtgagcaaaaacaggaaggcaaaatgccgcaaaaaagggaataagggcgacacggaaatgttgaatactcatactcttcctttttcaatattattgaagcatttatcagggttattgtctcatgagcggatacatatttgaatgtatttagaaaaataaacaaataggggttccgcgcacatttccccgaaaagtgccagatacctgaaacaaaacccatcgtacggccaaggaagtctccaataactgtgatccaccacaagcgccagggttttcccagtcacgacgttgtaaaacgacggccagtcatgcataatccgcacgcatctggaataaggaagtgccattccgcctgacctgagggcctatttcccatgattccttcatatttgcatatacgatacaaggctgttagagagataattggaattaatttgactgtaaacacaaagatattagtacaaaatacgtgacgtagaaagtaataatttcttgggtagtttgcagttttaaaattatgttttaaaatggactatcatatgcttaccgtaacttgaaagtatttcgatttcttggctttatatatcttgtggaaaggacgaaacaccgaatttctactaagtgtagatggctggcccgccccgcagtctattttttttctgcagatcgtcgaacgccttagggcattcgatgagatgaccactgacgtatgcggccgc

SEQ ID NO: 942 - DNA, 2581 bp, Synthetic construct
  source 1..2581: mol_type = other DNA
gaagggccgagcgcagaagtggtcctgcaactttatccgcctccatccagtctattaattgttgccgggaagctagagtaagtagttcgccagttaatagtttgcgcaacgttgttgccattgctacaggcatcgtggtgtcacgctcgtcgtttggtatggcttcattcagctccggttcccaacgatcaaggcgagttacatgatcccccatgttgtgcaaaaaagcggttagctccttcggtcctccgatcgttgtcagaagtaagttggccgcagtgttatcactcatggttatggcagcactgcataattctcttactgtcatgccatccgtaagatgcttttctgtgactggtgagtactcaaccaagtcattctgagaatagtgtatgcggcgaccgagttgctcttgcccggcgtcaatacgggataataccgcgccacatagcagaactttaaaagtgctcatcattggaaaacgttcttcggggcgaaaactctcaaggatcttaccgctgttgagatccagttcgatgtaacccactcgtgcacccaactgatcttcagcatcttttactttcaccagcgtttctgggtgagcaaaaacaggaaggcaaaatgccgcaaaaaagggaataagggcgacacggaaatgttgaatactcatactcttcctttttcaatattattgaagcatttatcagggttattgtctcatgagcggatacatatttgaatgtatttagaaaaataaacaaataggggttccgcgcacatttccccgaaaagtgccagatacctgaaacaaaacccatcgtacggccaaggaagtctccaataactgtgatccaccacaagcgccagggttttcccagtcacgacgttgtaaaacgacggccagtcatgcataatccgcacgcatctggaataaggaagtgccattccgcctgacctgagggcctatttcccatgattccttcatatttgcatatacgatacaaggctgttagagagataattggaattaatttgactgtaaacacaaagatattagtacaaaatacgtgacgtagaaagtaataatttcttgggtagtttgcagttttaaaattatgttttaaaatggactatcatatgcttaccgtaacttgaaagtatttcgatttcttggctttatatatcttgtggaaaggacgaaacaccgaatttctactaagtgtagattccaccccacagtggggccactatttttttctgcagatcgtcgaacgccttagggcattcgatgagatgaccactgacgtatgcggccgcaggctaggtggaggctcagtgatgataagtctgcgatggtggatgcatgtgtcatggtcatagctgtttcctgtgtgaaattgttatccgctcagagggcacaatcctattccgcgctatccgacaatctccaagacattaggtggagttcagttcggcgtatggcatatgtcgctggaaagaacatgtgagcaaaaggccagcaaaaggccaggaaccgtaaaaaggccgcgttgctggcgtttttccataggctccgcccccctgacgagcatcacaaaaatcgacgctcaagtcagaggtggcgaaacccgacaggactataaagataccaggcgtttccccctggaagctccctcgtgcgctctcctgttccgaccctgccgcttaccggatacctgtccgcctttctcccttcgggaagcgtggcgctttctcatagctcacgctgtaggtatctcagttcggtgtaggtcgttcgctccaagctgggctgtgtgcacgaaccccccgttcagcccgaccgctgcgccttatccggtaactatcgtcttgagtccaacccggtaagacacgacttatcgccactggcagcagccactggtaacaggattagcagagcgaggtatgtaggcggtgctacagagttcttgaagtggtggcctaactacggctacactagaagaacagtatttggtatctgcgctctgctgaagccagttaccttcggaaaaagagttggtagctcttgatccggcaaacaaaccaccgctggtagcggtggtttttttgtttgcaagcagcagattacgcgcagaaaaaaaggatctcaagaagatcctttgatcttttctacggggtctgacgctctattcaacaaagccgccgtcccgtcaagtcagcgtaaatgggtagggggcttcaaatcgtcctcgtgataccaattcggagcctgcttttttgtacaaacttgttgataatggcaattcaaggatcttcacctagatccttttaaattaaaaatgaagttttaaatcaatctaaagtatatatgagtaaacttggtctgacagttaccaatgcttaatcagtgaggcacctatctcagcgatctgtctatttcgttcatccatagttgcctgactccccgtcgtgtagataactacgatacgggagggcttaccatctggccccagtgctgcaatgataccgcgagagccacgctcaccggctccagatttatcagcaataaaccagccagccg

SEQ ID NO: 943 - DNA, 2581 bp, Synthetic construct
  source 1..2581: mol_type = other DNA
aggctaggtggaggctcagtgatgataagtctgcgatggtggatgcatgtgtcatggtcatagctgtttcctgtgtgaaattgttatccgctcagagggcacaatcctattccgcgctatccgacaatctccaagacattaggtggagttcagttcggcgtatggcatatgtcgctggaaagaacatgtgagcaaaaggccagcaaaaggccaggaaccgtaaaaaggccgcgttgctggcgtttttccataggctccgcccccctgacgagcatcacaaaaatcgacgctcaagtcagaggtggcgaaacccgacaggactataaagataccaggcgtttccccctggaagctccctcgtgcgctctcctgttccgaccctgccgcttaccggatacctgtccgcctttctcccttcgggaagcgtggcgctttctcatagctcacgctgtaggtatctcagttcggtgtaggtcgttcgctccaagctgggctgtgtgcacgaaccccccgttcagcccgaccgctgcgccttatccggtaactatcgtcttgagtccaacccggtaagacacgacttatcgccactggcagcagccactggtaacaggattagcagagcgaggtatgtaggcggtgctacagagttcttgaagtggtggcctaactacggctacactagaagaacagtatttggtatctgcgctctgctgaagccagttaccttcggaaaaagagttggtagctcttgatccggcaaacaaaccaccgctggtagcggtggtttttttgtttgcaagcagcagattacgcgcagaaaaaaaggatctcaagaagatcctttgatcttttctacggggtctgacgctctattcaacaaagccgccgtcccgtcaagtcagcgtaaatgggtagggggcttcaaatcgtcctcgtgataccaattcggagcctgcttttttgtacaaacttgttgataatggcaattcaaggatcttcacctagatccttttaaattaaaaatgaagttttaaatcaatctaaagtatatatgagtaaacttggtctgacagttaccaatgcttaatcagtgaggcacctatctcagcgatctgtctatttcgttcatccatagttgcctgactccccgtcgtgtagataactacgatacgggagggcttaccatctggccccagtgctgcaatgataccgcgagagccacgctcaccggctccagatttatcagcaataaaccagccagccggaagggccgagcgcagaagtggtcctgcaactttatccgcctccatccagtctattaattgttgccgggaagctagagtaagtagttcgccagttaatagtttgcgcaacgttgttgccattgctacaggcatcgtggtgtcacgctcgtcgtttggtatggcttcattcagctccggttcccaacgatcaaggcgagttacatgatcccccatgttgtgcaaaaaagcggttagctccttcggtcctccgatcgttgtcagaagtaagttggccgcagtgttatcactcatggttatggcagcactgcataattctcttactgtcatgccatccgtaagatgcttttctgtgactggtgagtactcaaccaagtcattctgagaatagtgtatgcggcgaccgagttgctcttgcccggcgtcaatacgggataataccgcgccacatagcagaactttaaaagtgctcatcattggaaaacgttcttcggggcgaaaactctcaaggatcttaccgctgttgagatccagttcgatgtaacccactcgtgcacccaactgatcttcagcatcttttactttcaccagcgtttctgggtgagcaaaaacaggaaggcaaaatgccgcaaaaaagggaataagggcgacacggaaatgttgaatactcatactcttcctttttcaatattattgaagcatttatcagggttattgtctcatgagcggatacatatttgaatgtatttagaaaaataaacaaataggggttccgcgcacatttccccgaaaagtgccagatacctgaaacaaaacccatcgtacggccaaggaagtctccaataactgtgatccaccacaagcgccagggttttcccagtcacgacgttgtaaaacgacggccagtcatgcataatccgcacgcatctggaataaggaagtgccattccgcctgacctgagggcctatttcccatgattccttcatatttgcatatacgatacaaggctgttagagagataattggaattaatttgactgtaaacacaaagatattagtacaaaatacgtgacgtagaaagtaataatttcttgggtagtttgcagttttaaaattatgttttaaaatggactatcatatgcttaccgtaacttgaaagtatttcgatttcttggctttatatatcttgtggaaaggacgaaacaccgaatttctactaagtgtagatacagtggggccactagggacaggtttttttctgcagatcgtcgaacgccttagggcattcgatgagatgaccactgacgtatgcggccgc

SEQ ID NO: 944 - DNA, 2581 bp, Synthetic construct
  source 1..2581: mol_type = other DNA
aggctaggtggaggctcagtgatgataagtctgcgatggtggatgcatgtgtcatggtcatagctgtttcctgtgtgaaattgttatccgctcagagggcacaatcctattccgcgctatccgacaatctccaagacattaggtggagttcagttcggcgtatggcatatgtcgctggaaagaacatgtgagcaaaaggccagcaaaaggccaggaaccgtaaaaaggccgcgttgctggcgtttttccataggctccgcccccctgacgagcatcacaaaaatcgacgctcaagtcagaggtggcgaaacccgacaggactataaagataccaggcgtttccccctggaagctccctcgtgcgctctcctgttccgaccctgccgcttaccggatacctgtccgcctttctcccttcgggaagcgtggcgctttctcatagctcacgctgtaggtatctcagttcggtgtaggtcgttcgctccaagctgggctgtgtgcacgaaccccccgttcagcccgaccgctgcgccttatccggtaactatcgtcttgagtccaacccggtaagacacgacttatcgccactggcagcagccactggtaacaggattagcagagcgaggtatgtaggcggtgctacagagttcttgaagtggtggcctaactacggctacactagaagaacagtatttggtatctgcgctctgctgaagccagttaccttcggaaaaagagttggtagctcttgatccggcaaacaaaccaccgctggtagcggtggtttttttgtttgcaagcagcagattacgcgcagaaaaaaaggatctcaagaagatcctttgatcttttctacggggtctgacgctctattcaacaaagccgccgtcccgtcaagtcagcgtaaatgggtagggggcttcaaatcgtcctcgtgataccaattcggagcctgcttttttgtacaaacttgttgataatggcaattcaaggatcttcacctagatccttttaaattaaaaatgaagttttaaatcaatctaaagtatatatgagtaaacttggtctgacagttaccaatgcttaatcagtgaggcacctatctcagcgatctgtctatttcgttcatccatagttgcctgactccccgtcgtgtagataactacgatacgggagggcttaccatctggccccagtgctgcaatgataccgcgagagccacgctcaccggctccagatttatcagcaataaaccagccagccggaagggccgagcgcagaagtggtcctgcaactttatccgcctccatccagtctattaattgttgccgggaagctagagtaagtagttcgccagttaatagtttgcgcaacgttgttgccattgctacaggcatcgtggtgtcacgctcgtcgtttggtatggcttcattcagctccggttcccaacgatcaaggcgagttacatgatcccccatgttgtgcaaaaaagcggttagctccttcggtcctccgatcgttgtcagaagtaagttggccgcagtgttatcactcatggttatggcagcactgcataattctcttactgtcatgccatccgtaagatgcttttctgtgactggtgagtactcaaccaagtcattctgagaatagtgtatgcggcgaccgagttgctcttgcccggcgtcaatacgggataataccgcgccacatagcagaactttaaaagtgctcatcattggaaaacgttcttcggggcgaaaactctcaaggatcttaccgctgttgagatccagttcgatgtaacccactcgtgcacccaactgatcttcagcatcttttactttcaccagcgtttctgggtgagcaaaaacaggaaggcaaaatgccgcaaaaaagggaataagggcgacacggaaatgttgaatactcatactcttcctttttcaatattattgaagcatttatcagggttattgtctcatgagcggatacatatttgaatgtatttagaaaaataaacaaataggggttccgcgcacatttccccgaaaagtgccagatacctgaaacaaaacccatcgtacggccaaggaagtctccaataactgtgatccaccacaagcgccagggttttcccagtcacgacgttgtaaaacgacggccagtcatgcataatccgcacgcatctggaataaggaagtgccattccgcctgacctgagggcctatttcccatgattccttcatatttgcatatacgatacaaggctgttagagagataattggaattaatttgactgtaaacacaaagatattagtacaaaatacgtgacgtagaaagtaataatttcttgggtagtttgcagttttaaaattatgttttaaaatggactatcatatgcttaccgtaacttgaaagtatttcgatttcttggctttatatatcttgtggaaaggacgaaacaccgaatttctactaagtgtagatagagggttctagacccagaggcttttttttctgcagatcgtcgaacgccttagggcattcgatgagatgaccactgacgtatgcggccgc

SEQ ID NO: 945 - DNA, 2898 bp, Synthetic construct
  source 1..2898: mol_type = other DNA
gctagcgagggcctatttcccatgattccttcatatttgcatatacgatacaaggctgttagagagataattggaattaatttgactgtaaacacaaagatattagtacaaaatacgtgacgtagaaagtaataatttcttgggtagtttgcagttttaaaattatgttttaaaatggactatcatatgcttaccgtaacttgaaagtatttcgatttcttggctttatatatcttgtggaaaggacgaaacaccgaatttctactaagtgtagatcctcactcctgctcggtgaattttttttttgaattctgatgcggtattttctccttacgcatctgtgcggtatttcacaccgcatacgtcaaagcaaccatagtacgcgccctgtagcggcgcattaagcgcggcgggtgtggtggttacgcgcagcgtgaccgctacacttgccagcgccttagcgcccgctcctttcgctttcttcccttcctttctcgccacgttcgccggctttccccgtcaagctctaaatcgggggctccctttagggttccgatttagtgctttacggcacctcgaccccaaaaaacttgatttgggtgatggttcacgtagtgggccatcgccctgatagacggtttttcgccctttgacgttggagtccacgttctttaatagtggactcttgttccaaactggaacaacactcaactctatctcgggctattcttttgatttataagggattttgccgatttcggtctattggttaaaaaatgagctgatttaacaaaaatttaacgcgaattttaacaaaatattaacgtttacaattttatggtgcactctcagtacaatctgctctgatgccgcatagttaagccagccccgacacccgccaacacccgctgacgcgccctgacgggcttgtctgctcccggcatccgcttacagacaagctgtgaccgtctccgggagctgcatgtgtcagaggttttcaccgtcatcaccgaaacgcgcgagacgaaagggcctcgtgatacgcctatttttataggttaatgtcatgataataatggtttcttagacgtcaggtggcacttttcggggaaatgtgcgcggaacccctatttgtttatttttctaaatacattcaaatatgtatccgctcatgagacaataaccctgataaatgcttcaataatattgaaaaaggaagagtatgagtattcaacatttccgtgtcgcccttattcccttttttgcggcattttgccttcctgtttttgctcacccagaaacgctggtgaaagtaaaagatgctgaagatcagttgggtgcacgagtgggttacatcgaactggatctcaacagcggtaagatccttgagagttttcgccccgaagaacgttttccaatgatgagcacttttaaagttctgctatgtggcgcggtattatcccgtattgacgccgggcaagagcaactcggtcgccgcatacactattctcagaatgacttggttgagtactcaccagtcacagaaaagcatcttacggatggcatgacagtaagagaattatgcagtgctgccataaccatgagtgataacactgcggccaacttacttctgacaacgatcggaggaccgaaggagctaaccgcttttttgcacaacatgggggatcatgtaactcgccttgatcgttgggaaccggagctgaatgaagccataccaaacgacgagcgtgacaccacgatgcctgtagcaatggcaacaacgttgcgcaaactattaactggcgaactacttactctagcttcccggcaacaattaatagactggatggaggcggataaagttgcaggaccacttctgcgctcggcccttccggctggctggtttattgctgataaatctggagccggtgagcgtggaagccgcggtatcattgcagcactggggccagatggtaagccctcccgtatcgtagttatctacacgacggggagtcaggcaactatggatgaacgaaatagacagatcgctgagataggtgcctcactgattaagcattggtaactgtcagaccaagtttactcatatatactttagattgatttaaaacttcatttttaatttaaaaggatctaggtgaagatcctttttgataatctcatgaccaaaatcccttaacgtgagttttcgttccactgagcgtcagaccccgtagaaaagatcaaaggatcttcttgagatcctttttttctgcgcgtaatctgctgcttgcaaacaaaaaaaccaccgctaccagcggtggtttgtttgccggatcaagagctaccaactctttttccgaaggtaactggcttcagcagagcgcagataccaaatactgttcttctagtgtagccgtagttaggccaccacttcaagaactctgtagcaccgcctacatacctcgctctgctaatcctgttaccagtggctgctgccagtggcgataagtcgtgtcttaccgggttggactcaagacgatagttaccggataaggcgcagcggtcgggctgaacggggggttcgtgcacacagcccagcttggagcgaacgacctacaccgaactgagatacctacagcgtgagctatgagaaagcgccacgcttcccgaagggagaaaggcggacaggtatccggtaagcggcagggtcggaacaggagagcgcacgagggagcttccagggggaaacgcctggtatctttatagtcctgtcgggtttcgccacctctgacttgagcgtcgatttttgtgatgctcgtcaggggggcggagcctatggaaaaacgccagcaacgcggcctttttacggttcctggccttttgctggccttttgctca

SEQ ID NO: 946 - DNA, 2898 bp, Synthetic construct
  source 1..2898: mol_type = other DNA
gctagcgagggcctatttcccatgattccttcatatttgcatatacgatacaaggctgttagagagataattggaattaatttgactgtaaacacaaagatattagtacaaaatacgtgacgtagaaagtaataatttcttgggtagtttgcagttttaaaattatgttttaaaatggactatcatatgcttaccgtaacttgaaagtatttcgatttcttggctttatatatcttgtggaaaggacgaaacaccgaatttctactaagtgtagatctgatggtccatgtctgttactctttttttgaattctgatgcggtattttctccttacgcatctgtgcggtatttcacaccgcatacgtcaaagcaaccatagtacgcgccctgtagcggcgcattaagcgcggcgggtgtggtggttacgcgcagcgtgaccgctacacttgccagcgccttagcgcccgctcctttcgctttcttcccttcctttctcgccacgttcgccggctttccccgtcaagctctaaatcgggggctccctttagggttccgatttagtgctttacggcacctcgaccccaaaaaacttgatttgggtgatggttcacgtagtgggccatcgccctgatagacggtttttcgccctttgacgttggagtccacgttctttaatagtggactcttgttccaaactggaacaacactcaactctatctcgggctattcttttgatttataagggattttgccgatttcggtctattggttaaaaaatgagctgatttaacaaaaatttaacgcgaattttaacaaaatattaacgtttacaattttatggtgcactctcagtacaatctgctctgatgccgcatagttaagccagccccgacacccgccaacacccgctgacgcgccctgacgggcttgtctgctcccggcatccgcttacagacaagctgtgaccgtctccgggagctgcatgtgtcagaggttttcaccgtcatcaccgaaacgcgcgagacgaaagggcctcgtgatacgcctatttttataggttaatgtcatgataataatggtttcttagacgtcaggtggcacttttcggggaaatgtgcgcggaacccctatttgtttatttttctaaatacattcaaatatgtatccgctcatgagacaataaccctgataaatgcttcaataatattgaaaaaggaagagtatgagtattcaacatttccgtgtcgcccttattcccttttttgcggcattttgccttcctgtttttgctcacccagaaacgctggtgaaagtaaaagatgctgaagatcagttgggtgcacgagtgggttacatcgaactggatctcaacagcggtaagatccttgagagttttcgccccgaagaacgttttccaatgatgagcacttttaaagttctgctatgtggcgcggtattatcccgtattgacgccgggcaagagcaactcggtcgccgcatacactattctcagaatgacttggttgagtactcaccagtcacagaaaagcatcttacggatggcatgacagtaagagaattatgcagtgctgccataaccatgagtgataacactgcggccaacttacttctgacaacgatcggaggaccgaaggagctaaccgcttttttgcacaacatgggggatcatgtaactcgccttgatcgttgggaaccggagctgaatgaagccataccaaacgacgagcgtgacaccacgatgcctgtagcaatggcaacaacgttgcgcaaactattaactggcgaactacttactctagcttcccggcaacaattaatagactggatggaggcggataaagttgcaggaccacttctgcgctcggcccttccggctggctggtttattgctgataaatctggagccggtgagcgtggaagccgcggtatcattgcagcactggggccagatggtaagccctcccgtatcgtagttatctacacgacggggagtcaggcaactatggatgaacgaaatagacagatcgctgagataggtgcctcactgattaagcattggtaactgtcagaccaagtttactcatatatactttagattgatttaaaacttcatttttaatttaaaaggatctaggtgaagatcctttttgataatctcatgaccaaaatcccttaacgtgagttttcgttccactgagcgtcagaccccgtagaaaagatcaaaggatcttcttgagatcctttttttctgcgcgtaatctgctgcttgcaaacaaaaaaaccaccgctaccagcggtggtttgtttgccggatcaagagctaccaactctttttccgaaggtaactggcttcagcagagcgcagataccaaatactgttcttctagtgtagccgtagttaggccaccacttcaagaactctgtagcaccgcctacatacctcgctctgctaatcctgttaccagtggctgctgccagtggcgataagtcgtgtcttaccgggttggactcaagacgatagttaccggataaggcgcagcggtcgggctgaacggggggttcgtgcacacagcccagcttggagcgaacgacctacaccgaactgagatacctacagcgtgagctatgagaaagcgccacgcttcccgaagggagaaaggcggacaggtatccggtaagcggcagggtcggaacaggagagcgcacgagggagcttccagggggaaacgcctggtatctttatagtcctgtcgggtttcgccacctctgacttgagcgtcgatttttgtgatgctcgtcaggggggcggagcctatggaaaaacgccagcaacgcggcctttttacggttcctggccttttgctggccttttgctca

SEQ ID NO: 947 - skipped

SEQ ID NO: 948 - DNA, 6030 bp, Synthetic construct
  source 1..6030: mol_type = other DNA
acacttaatattgaggatgaacatagattgcacgagacctctaaggaacctgatgtttctcttggatcaacttggttgtcagatttcccacaagcatgggcagagaccggaggtatgggtcttgctgttaggcaggcaccacttattattcctttgaaggcaacctctactcctgtgtcaattaagcaatatccaatgtctcaggaagctaggcttggaattaagcctcacattcaaagacttttggatcagggtattttggtgccatgtcaatcaccttggaacacaccacttttgcctgttaagaagcctggaactaatgattacagaccagtgcaagatttgagggaggttaacaagagagtggaagatattcacccaactgttccaaacccttataatcttttgtctggattgccaccttcacatcaatggtacactgtgcttgatttgaaggatgcatttttctgccttaggttgcatccaacatctcagcctctttttgctttcgagtggagagatcctgaaatgggaatttctggtcaacttacatggaccaggttgcctcagggtttcaagaactcaccaaccttgtttaatgaggcacttcacagggatttggctgattttaggattcaacatcctgatcttatccttttgcagtatgttgatgatcttttgcttgctgcaacttctgaattggattgtcaacagggaactagggcattgcttcaaacacttggaaatttgggttacagagcttcagcaaagaaggctcagatttgccaaaagcaggttaagtatcttggatacttgcttaaggaaggacaaaggtggttgaccgaggctagaaaggaaactgtgatgggtcaaccaacacctaagacccctaggcagcttagagagttcttgggaaaggcaggtttttgtaggcttttcattccaggatttgctgaaatggctgcaccactttatcctttgaccaagcctggaactttgtttaactggggtccagatcaacagaaggcataccaagaaattaagcaggctttgcttactgctccagcacttggtttgcctgatcttacaaagccatttgagttgttcgttgatgaaaagcaaggatatgcaaagggtgtgcttacccagaagttgggaccttggagaaggcctgttgcttacctttctaagaaacttgatccagtggctgcaggttggccaccttgtcttagaatggttgctgcaattgcagtgcttacaaaggatgctggaaagttgactatgggacaacctcttgttattttggcaccacacgctgttgaggcacttgtgaagcagccacctgataggtggttgtcaaacgcaagaatgacccattatcaagctcttcttttggatactgatagggtgcagttcggtcctgttgtggctttgaatccagcaacacttttgccacttcctgaggaaggattgcaacacaactgccttgatattttggctgaggcacatggtacaagacctgatcttaccgatcagccattgcctgatgctgatcacacttggtacacagatggatcttcacttttgcaagaaggacagaggaaggctggtgctgcagttactacagagactgaagtgatttgggctaaggcacttccagctggaacatctgctcaaagagcagagcttattgctttgacccaggcacttaagatggctgaaggaaagaagttgaacgtttacactgattctaggtatgctttcgcaacagctcatattcacggagaaatctatagaaggagaggatggttgacatcagagggaaaggaaattaagaacaaggatgaaattcttgcacttttgaaggctctttttcttcctaagagattgtctattattcattgcccaggacaccaaaagggtcattcagcagaagctaggggaaatagaatggctgatcaggctgcaagaaaggctgcaattactgagacacctgatacctctactcttttgatcgaaaactcttcaccaaattcaaggcttattaactctggtggttcaagcggaggctcatctggcagcgaaactccgggcacttccgagtcagctactcctgagtctagcggcgggtcgtcaggagggtcttccaagctggagaagtttacaaactgttacagcctctccaaaaccctcaggtttaaagcgatcccggtgggcaagacccaggagaacatcgacaacaagaggctcctggtggaagacgagaagcgcgccgaagactacaagggcgtgaagaagctgctcgataggtactacctcagctttattaacgacgtgctgcacagcatcaaactcaagaatctcaacaactacatctccctcttccgcaaaaagacccgcaccgagaaggagaacaaggagctggagaacctggagatcaacctccgcaaggaaatcgccaaagcgttcaagggcaatgaagggtacaagagcctcttcaagaaagacatcatcgaaactatcctcccagagtttctcgatgacaaggacgagatcgcgctggtgaactcctttaacgggttcacaaccgcgtttaccggcttctttgataacagggaaaatatgttctccgaggaggccaagtccaccagcatcgccttcaggtgtatcaacgagaacctcacccgctacatttccaatatggacattttcgagaaggtggatgcgatcttcgataagcacgaggtgcaggagatcaaagagaagattctcaattccgattatgacgtcgaggatttcttcgaaggggagttctttaattttgtgctcacacaagagggcattgacgtgtacaacgcgattatcgggggcttcgtcacagagtccggggagaagattaaggggctgaatgagtacatcaatctgtacaatcagaagaccaagcagaaactgccgaaattcaagccgctctacaagcaagtcctgtccgatagggaaagcctctccttctacggcgagggctataccagcgacgaggaggtgctggaagtcttccgcaacacactgaataagaatagcgagattttctcctccatcaagaagctcgagaagctctttaagaactttgacgagtacagctccgccgggattttcgtgaagaacgggccggcgatcagcaccatctccaaggacatctttggcgagtggaacgtcatcagggacaagtggaacgccgagtacgacgacatccacctgaagaagaaggcggtggtgaccgagaagtatgaggacgatcgcaggaagtccttcaaaaaaatcggctccttcagcctcgaacagctccaggagtatgccgatgcggatctgtccgtcgtcgagaagctgaaggaaatcatcattcagaaggtcgacgagatctataaagtgtacgggtccagcgagaagctgttcgacgccgactttgtgctcgagaagtccctcaaaaagaatgacgccgtggtggccattatgaaagacctgctcgactccgtgaagtccttcgaaaattacattaaagcgttctttggggaggggaaggaaactaacagggatgagtccttctatggcgactttgtcctcgcgtacgacatcctgctgaaggtcgaccacatttacgacgcgatccgcaactacgtgacacagaagccgtactccaaagacaagttcaagctgtacttccagaacccgcaatttatggggggctgggacaaggataaagagacagactaccgcgcgacaattctccgctatggctccaaatactatctggccatcatggacaagaagtacgcgaagtgcctgcagaagatcgacaaagacgacgtcaatggcaactatgaaaagatcaactacaagctgctgccgggcccgaacaagatgctcccgaaggtgttcttcagcaagaagtggatggcctactacaatccaagcgaggatattcagaaaatctataaaaacgggaccttcaagaagggggacatgtttaacctcaacgactgccacaagctcattgatttcttcaaggatagcatttcccgctacccgaaatggtccaatgcgtacgattttaacttctccgagacagaaaagtacaaagacatcgcgggcttttacagggaggtggaggagcaagggtataaagtttcttttgaatccgcgagcaagaaggaagtcgacaagctcgtcgaggagggcaagctctacatgttccaaatttataacaaggacttttccgacaagagccatgggaccccaaacctccacaccatgtacttcaaactgctctttgacgagaacaaccacgggcaaatcaggctgagcggcggcgccgaattattcatgcgcagggcctccctcaagaaggaagagctggtcgtccatccagccaattccccgatcgcgaacaagaacccggacaatccgaaaaagaccaccaccctgtcctacgacgtctacaaggacaaacgcttcagcgaagaccagtacgaattacacatcccaattgcgattaataagtgcccaaagaatatcttcaaaattaatacagaggtcagggtgctgctcaaacacgacgacaatccgtatgtcatcggcattgacaggggcgagcgcaatctgctctatatcgtggtcgtggatgggaagggcaatattgtggagcagtactccctgaacgagattatcaacaacttcaatgggattaggattaagaccgactatcacagcctgctcgacaagaaagaaaaagagaggtttgaggcccgccaaaactggacctccattgagaatatcaaagaattaaaggccggctatatttcccaagtcgtccacaagatctgcgagctggtggagaaatatgacgccgtgattgcgctcgaagacttaaattctgggttcaagaactcccgcgtgaaggtggaaaaacaggtgtatcagaaattcgagaaaatgctgatcgacaaactcaattatatggtggataagaagtccaacccgtgtgccacagggggcgcgctgaagggctatcagatcaccaacaagttcgagagcttcaagagcatgagcacccagaacgggtttattttctacatcccggcgtggctcacctccaagattgacccgagcaccggcttcgtgaacctcctgaagacaaagtatacctccattgccgacagcaagaagtttatctcctccttcgaccgcattatgtatgtgccggaggaggacctcttcgagttcgccctcgactacaaaaacttcagccgcacagatgcggattacatcaagaagtggaagctgtactcctacgggaacaggatccgcatcttcaggaatccaaaaaaaaataacgtctttgactgggaggaagtgtgcctgacatccgcctacaaggaactgttcaataaatacggcatcaattaccagcagggcgacattcgcgccctcctctgtgagcagtccgacaaagcgttttactccagcttcatggccctcatgtccctgatgctccaaatgaggaatagcatcacagggcgcaccgacgtcgacttcctcatcagcccggtgaagaactccgacgggatcttttacgactcccgcaactatgaggcgcaagagaatgcgatcctcccgaagaacgccgatgcgaacggggcctataatatcgccaggaaagtgctctgggccatcgggcagttcaaaaaggcggaggatgagaagctcgacaaggtgaaaattgccatttccaacaaggagtggctggagtacgcgcagacctccgtgaagcactctggtggttcaagcggaggctcatctggcagcgaaactccgggcacttccgagtcagctactcctgagtctagcggcgggtcgtcaggagggtctgctcttgattttctttctaggcttccattgccacctccagtttctccaatttgtacttttgtgtcacctgctgcacaaaaggcattccagcctccaaggtcatgcgga

SEQ ID NO: 949 - DNA, 3918 bp, Synthetic construct
  source 1..3918: mol_type = other DNA
actcagtttgagggattcacaaatctttaccaagtgtctaagactttgaggttcgagcttattccacaaggaaagacattgaagcacattcaagaacagggttttattgaggaagataaggctaggaatgatcattataaggaacttaagcctattattgatagaatctataagacctacgcagatcaatgtttgcagcttgttcaacttgattgggagaacttgtctgctgcaattgattcatacaggaaggaaaagacagaggaaaccagaaacgctcttattgaggaacaagctacttacaggaatgcaattcacgattatttcattggaagaaccgataacttgactgatgctattaataagagacatgcagaaatctataagggtctttttaaggctgagctttttaacggaaaggtgttgaagcagcttggtacagttactacaaccgagcacgaaaacgcacttttgaggtcttttgataagttcactacatacttctcaggattctacagaaacaggaagaatgtgttctctgctgaggatatttcaaccgcaatcccacatagaatcgttcaagataacttccctaagttcaaggaaaactgccacatttttacaaggcttatcaccgctgtgccatctttgagagaacatttcgaaaacgttaagaaggcaatcggtatctttgtgtctacttcaatcgaggaagttttctcttttcctttctacaaccaacttttgacccaaactcagattgatctttacaaccagcttttgggaggtatttcaagggaggctggaaccgaaaagattaagggtttgaacgaggttttgaatcttgcaatccaaaagaatgatgaaactgctcatattattgcatcacttccacacaggtttattcctcttttcaagcagattttgtctgatagaaacactctttcttttattcttgaggagtttaagtctgatgaggaagtgattcaatcattttgcaagtataagacacttttgagaaacgagaatgttcttgagactgctgaagcattgttcaacgaacttaattctattgatttgacccatattttcatttcacacaagaagttggagactatttcttctgctttgtgcgatcactgggatacattgaggaatgcactttacgagagaaggatttctgaattgactggaaagattacaaagtctgctaaggaaaaggttcaaagatcacttaagcatgaggatattaacttgcaggaaattatttctgctgcaggaaaggagctttcagaggcttttaagcaaaagacttctgagattttgtcacatgcacacgctgcattggatcagccacttcctaccactttgaagaagcaagaggaaaaggaaattcttaagtctcagttggattcacttttgggactttatcatcttttggattggttcgctgtggatgagtctaacgaggttgatccagagttttcagcaaggcttacaggtattaagttggagatggaaccttctttgtcattttacaacaaggctagaaactacgcaacaaagaagccatattctgtggagaagtttaagttgaacttccaaatgcctaccttggctaggggatgggatgtgaatagagaaaagaacaatggtgcaatccttttcgttaagaacggattgtactaccttggtattatgccaaagcagaagggaagatacaaggctttgtcttttgagcctactgaaaagacatcagaaggtttcgataagatgtactacgattacttcccagatgctgcaaagatgattcctaagtgttctactcaacttaaggctgttactgcacatttccagacacacacaaccccaatccttttgtcaaacaatttcatcgagcctcttgaaatcacaaaggaaatctatgatttgaacaatccagagaaggaacctaagaagttccaaaccgcttatgctaagaaaactggagatcagaagggttatagggaagctctttgcaagtggattgattttaccagagatttcttgtctaagtacactaagactacatcaattgatctttcttctcttagaccatcttctcaatacaaggatcttggagagtattacgctgaattgaaccctcttttgtaccacatttcttttcaaagaatcgctgagaaggaaattatggatgcagtggagactggaaagttgtatctttttcaaatctataacaaggatttcgcaaagggacatcatggaaagccaaatttgcataccctttactggactggacttttctctcctgagaacttggctaagacatctattaagttgaatggtcaggcagaattgttttataggccaaagtctaggatgaagaggatggctcatagacttggagaaaagatgcttaacaagaagttgaaggatcaaaagaccccaattcctgatactctttaccaggagttgtatgattacgttaatcataggctttctcacgatttgtcagatgaagctagagcacttttgcctaacgtgatcacaaaggaagtttctcacgaaattattaaggatagaaggttcacctctgataagtttttctttcatgtgccaatcactttgaactaccaagctgcaaattctccttcaaagtttaaccagagggttaatgcttatcttaaggagcatccagaaacccctattattggaattgatagaggtgagaggaacttgatctatatcacagtgattgattctaccggaaagattcttgagcaaagatcattgaataccattcaacagttcgattatcaaaagaagttggataacagagagaaggaaagggttgctgctagacaagcatggtctgttgtgggaactattaaggatcttaagcagggttacttgtcacaagtgattcatgagattgttgatttgatgattcactatcaggcagttgtggttttggaaaaccttaatttcggattcaagtctaagaggactggtattgctgagaaggcagtgtaccaacagttcgaaaagatgcttatcgataagttgaactgtttggttcttaaggattacccagctgagaaagtgggaggtgttcttaacccttatcagttgacagatcaattcacttcttttgctaagatgggaacacaatcaggttttcttttctatgttccagcaccttacacatctaagattgatccattgaccggatttgttgatccattcgtttggaaaactattaagaaccatgagtcaagaaagcacttccttgaaggatttgatttcttgcattacgatgttaagactggagatttcatcttgcacttcaagatgaacaggaatctttcttttcaaagaggattgccaggtttcatgcctgcttgggatattgtttttgagaagaacgaaactcagttcgatgctaagggaacaccattcattgcaggaaagagaattgtgcctgttattgagaatcacagattcactggtagatatagggatctttacccagctaacgaattgattgcacttttggaggaaaagggaattgtttttagggatggttctaacattcttcctaagttgcttgagaatgatgattcacatgctattgatactatggtggcacttattaggtctgttttgcaaatgagaaactcaaatgctgcaacaggagaggattacattaactctccagtgagggatttgaatggtgtttgctttgattcaagattccaaaacccagaatggcctatggatgctgatgcaaacggagcttatcatattgcacttaagggtcagcttttgcttaatcacttgaaggagtctaaggatttgaagttgcagaacggtatttcaaatcaagattggcttgcttacattcaggaattgagaaac

SEQ ID NO: 950 - DNA, 133 bp, Synthetic construct
  source 1..133: mol_type = other DNA
gtaagtatcaaggttacaagacaggtttaaggagaccaatagaaactgggcttgtcgagacagagaagactcttgcgtttctgataggcacctattggtcttactgacatccactttgcctttctctccacag

SEQ ID NO: 951 - protein, 1376 aa, synthetic construct
MSKLEKFTNCYSLSKTLRFKAIPVGKTQENIDNKRLLVEDEKRAEDYKGVKKLLDRYYLSFINDVLHSIKLKNLNNYISLFRKKTRTEKENKELENLEINLRKEIAKAFKGNEGYKSLFKKDIIETILPEFLDDKDEIALVNSFNGFTTAFTGFFDNRENMFSEEAKSTSIAFRCINENLTRYISNMDIFEKVDAIFDKHEVQEIKEKILNSDYDVEDFFEGEFFNFVLTQEGIDVYNAIIGGFVTESGEKIKGLNEYINLYNQKTKQKLPKFKPLYKQVLSDRESLSFYGEGSSGENQTTQKGQKNSRERMKRIEEGIKELGSQILKEHPVENTQLQNEKLYLYYLQNGRDMYVDQELDINRLSDYDVDHIVPQSFLKDDSIDNKVLTRSDKNRGKSDNVPSEEVVKKMKNYWRQLLNAKLITQRKFDNLTKAERGGLSGYTSDEEVLEVFRNTLNKNSEIFSSIKKLEKLFKNFDEYSSAGIFVKNGPAISTISKDIFGEWNVIRDKWNAEYDDIHLKKKAVVTEKYEDDRRKSFKKIGSFSLEQLQEYADADLSVVEKLKEIIIQKVDEIYKVYGSSEKLFDADFVLEKSLKKNDAVVAIMKDLLDSVKSFENYIKAFFGEGKETNRDESFYGDFVLAYDILLKVDHIYDAIRNYVTQKPYSKDKFKLYFQNPQFMGGWDKDKETDYRATILRYGSKYYLAIMDKKYAKCLQKIDKDDVNGNYEKINYKLLPGPNKMLPKVFFSKKWMAYYNPSEDIQKIYKNGTFKKGDMFNLNDCHKLIDFFKDSISRYPKWSNAYDFNFSETEKYKDIAGFYREVEEQGYKVSFESASKKEVDKLVEEGKLYMFQIYNKDFSDKSHGTPNLHTMYFKLLFDENNHGQIRLSGGAELFMRRASLKKEELVVHPANSPIANKNPDNPKKTTTLSYDVYKDKRFSEDQYELHIPIAINKCPKNIFKINTEVRVLLKHDDNPYVIGIDRGERNLLYIVVVDGKGNIVEQYSLNEIINNFNGIRIKTDYHSLLDKKEKERFEARQNWTSIENIKELKAGYISQVVHKICELVEKYDAVIALEDLNSGFKNSRVKVEKQVYQKFEKMLIDKLNYMVDKKSNPCATGGALKGYQITNKFESFKSMSTQNGFIFYIPAWLTSKIDPSTGFVNLLKTKYTSIADSKKFISSFDRIMYVPEEDLFEFALDYKNFSRTDADYIKKWKLYSYGNRIRIFRNPKKNNVFDWEEVCLTSAYKELFNKYGINYQQGDIRALLCEQSDKAFYSSFMALMSLMLQMRNSITGRTDVDFLISPVKNSDGIFYDSRNYEAQENAILPKNADANGAYNIARKVLWAIGQFKKAEDEKLDKVKIAISNKEWLEYAQTSVKH
